(19) United States
(12) Patent Application Publication
(10) Pub. No.: US 2025/0297326 A1
(43) Pub. Date: Sep. 25, 2025

(54) SNPS PANEL FOR KINSHIP IDENTIFICATION IN KOREAN AND USE THEREOF

(71) Applicant: REPUBLIC OF KOREA(NATIONAL FORENSIC SERVICE DIRECTOR MINISTRY OF INTERIOR AND SAFETY, Gangwon-do (KR)

(72) Inventors: Cho Hee KIM, Gangwon-do (KR); Kyungmyung LEE, Gangwon-do (KR); Suyeon YOO, Gangwon-do (KR); Byeong Ju YOUN, Gangwon-do (KR)

(21) Appl. No.: 18/850,720

(22) PCT Filed: Sep. 27, 2022
(86) PCT No.: PCT/KR2022/014443

§ 371 Date: Sep. 25, 2024

(30) Foreign Application Priority Data
May 12, 2022 (KR) 10-2022-0058633
May 12, 2022 (KR) 10-2022-0058635

(51) Int. Cl. C12Q 1/6888; C12Q 1/6809; C12Q 1/6827

(52) U.S. Cl. CPC C12Q 1/6888; C12Q 1/6809; C12Q 1/6827; C12Q 2600/156

(57) ABSTRACT

The present invention relates to information regarding an SNP panel for kinship identification in Korean and a use thereof. The composition for kinship identification in Korean of the present invention may be advantageously utilized to enable, even when no parent DNA is available, the use of only the minimum number of forensic SNP markers to clearly distinguish with respect to a subject, individuals in a first-degree relationship that is one of parent, child, brother, sister, and sibling, from individuals who are not in any first-degree relationship, or to provide information on individuals who are possibly in a first-degree relationship and individuals who may not be in any first-degree relationship.

### CROSS-REFERENCE TO RELATED APPLICATIONS

[0001] This application is a national phase application of PCT Application No. PCT/KR2022/014443, filed on 27 Sep. 2022, which claims the benefit and priority to Korean Patent Application Nos. 10-2022-0058633, filed on 12 May 2022, and 10-2022-0058635, filed on 12 May 2022. The entire disclosures of the applications identified in this paragraph are incorporated herein by references.

### SEQUENCE LISTING

[0002] This application contains references to amino acid sequences and/or nucleic acid sequences which have been submitted concurrently herewith as the sequence listing XML file entitled “000366usnp_SequenceListing.XML”, file size 2,007,040 bytes, created on 30 Apr. 2025. The aforementioned sequence listing is hereby incorporated by reference in its entirety pursuant to 37 C.F.R. § 1.52(e)(5).

### TECHNICAL FIELD

[0003] The present invention relates to an SNP (single nucleotide polymorphism) panel for kinship identification in Korean and a use thereof.

[0004] The present invention was made with the support of the Ministry of the Interior and Safety of the Republic of Korea under Project ID Number 1315001668 and Project Number NFS2021 DNA02, which was executed in the research project named “the Mid- to Long-Term Development Plan of Scientific Investigation Research and Development (R&D)” in the research project titled “Development and uses of SNP panels for kinship identification” by National Forensic Service, from 1 Jan. to 31 Dec. 2021.

### BACKGROUND ART

[0005] STR (short tandem repeats) is a concept originated from the gene of HLA (human leukocyte antigen, membrane protein of leukocytes), wherein 1 to 6 bases in the gene form a single motif and the motif is repeated. STRs are inherited through generations, are used to diagnose genetic diseases due to their relatively high polymorphic nature, have been continuously maintained and managed by CODIS (Combined DNA Index System) at Federal Bureau of Investigation (FBI), and are also genetic markers used to establish identity of a person and confirm familial relations.

[0006] Methods of establishing identity of a person or confirming familial relations by using such STRs involve measuring the size of an entire gene formed by various motifs via capillary electrophoresis, thereby estimating the number of motif repeats. However, these methods may lead to an inaccurate result if there are variants or mutations in an amplified individual gene, and may be unable to identify kinship when genes have a length of 300 bp or more in severely degraded samples with low DNA yield.

[0007] These limitations have been previously reported in the academia since early 2000 when the international human genome research was conducted, and various techniques to overcome such limitations have been suggested. Particularly, along with advancements made in the DNA sequencing technology, next generation sequencing (NGS) technology have been globally and gradually incorporated into and found applications in forensic investigations on a greater number of genetic variations.

[0008] Furthermore, the current analysis on corpses with unknown identity and missing children only allows one-on-one comparisons between an unknown corpse and the unknown corpse's guardian group, and between a missing child and the missing child's guardian, and paternity testing (‘1-chon’ which is parent-child relationship in the ‘chonsu’ system referring to the degree of kinship in Korea) through mutual search. For other relationships of higher degrees, only one-on-one comparison between specific individuals is possible, and one-to-many searches are not possible. In this context, there is a need to analyze the genome of Korean individuals and develop a minimum number of forensic SNP markers that enables identification of relationships of ‘2-chon’ or higher (the ‘2-chon’ is full sibling relationship or grandparent-grandchild relationship in the ‘chonsu’ system in Korea).

### DISCLOSURE

### Technical Problem

[0009] The present inventors have endeavoured to develop the minimum number of forensic SNP markers that enables kinship identification in a Korean population. As a result, from about 84 million SNPs of 88 unrelated Korean individuals disclosed in Korean National Standard Reference Variome (KoVariome) database, the present inventors have discovered 918 SNP markers and 482 SNP markers for kinship identification in a Korean population and demonstrated that by using these markers, in a group of Korean individuals who are in first- to fourth-degree relationships, it was possible to clearly distinguish with respect to a test person, individuals who are in a first-degree relationship as one of parent, child, brother, sister, and sibling, from individuals who are not in any first-degree relationship, and even in the absence of parent DNA information, it was possible to distinguish, with respect to a test person, individuals who are in any one of relationships as brother, sister, and sibling, from those who are not in any of such relationships. By demonstrating the above, the present inventors have arrived at the SNP panels for kinship identification in Korean.

[0010] Accordingly, a purpose of the present invention is to provide an SNP panel for kinship identification in Korean.

[0011] Another purpose of the present invention is to provide a composition or kit for kinship identification in Korean comprising the above-described SNP panel.

[0012] Still another purpose of the present invention is to provide a method of kinship identification in Korean, comprising identifying the nucleotide at the above-described SNP.

### Technical Solution

[0013] According to one aspect of the present invention, the present invention provides a composition for kinship identification in Korean, the composition comprising:
[0014] 1) an agent for amplifying or detecting a single nucleotide polymorphism (SNP) located at position 101 in at least one sequence selected from the group consisting of nucleotide sequences set forth as SEQ ID NO: 1 to SEQ ID NO: 918;
[0015] 2) an agent for amplifying or detecting a single nucleotide polymorphism (SNP) located at position 101 in at least one sequence selected from the group consisting of nucleotide sequences set forth as SEQ ID NO: 919 to SEQ ID NO: 1400; or
[0016] 3) an agent for amplifying or detecting a single nucleotide polymorphism (SNP) located at position 101 in at least one sequence selected from the group consisting of nucleotide sequences set forth as SEQ ID NO: 1 to SEQ ID NO: 1400.

[0017] The present inventors have endeavoured to develop the minimum number of forensic SNP markers that enables kinship identification in a Korean population. As a result, from about 84 million SNPs of 88 unrelated Korean individuals disclosed in Korean National Standard Reference Variome (KoVariome) database, the present inventors have discovered 918 SNP markers and 482 SNP markers for kinship identification in a Korean population and demonstrated that by using these markers, in a group of Korean individuals who are in first- to fourth-degree relationships, it was possible to clearly distinguish with respect to a test person, individuals who are in a first-degree relationship as one of parent, child, brother, sister, and sibling, from individuals who are not in any first-degree relationship, and even in the absence of parent DNA information, it was possible to distinguish, with respect to a test person, individuals who are in any one of relationships as brother, sister, and sibling, from those who are not in any of such relationships.

[0018] Therefore, the composition for kinship identification in Korean according to the present invention may be utilized to resolve cases that the prior art STR technology used for the purpose of identification was unable to resolve, such as when brother-brother, sister-sister, or brother-sister relationships need to be identified without information of parents, when there are mutations within individual CODIS-23 loci, when DNA in the sample to be analyzed is severely fragmented due to skeletonization or putrefaction, and when the genetic distance between the test sample and the surviving family members is large. In addition, unlike the conventional STR techniques, since NGS technology enables simultaneous identification of multiple SNPs on the chromosome in multiple samples, the composition for kinship identification in Korean of the present invention is expected to play a significant role in establishing identity of multiple victims in massive disaster events when such a need arises.

[0019] In particular, while when using STR markers, complete replication of a motif having a size of 80 bp to 400 bp at a gene locus is necessary to identify the accurate allele type of the corresponding gene locus, when using the composition for kinship identification in Korean according to the present invention, since a single base for each SNP marker needs to be identified, kinship identification can be made even when the sample to be analyzed is in a skeletonized state or severely putrefied, thus rendering the DNA in the sample severely fragmented.

[0020] Also, since there have been many reports for individuals having a mutation within CODIS-23 loci being reported to have a different allele type from the parents' generation even when it is clear that they are biologically related, estimation of kinship using STR technology may be limited at CODIS-23 loci. However, the 918-SNP panel and the 482-SNP panel according to the present invention are selected by excluding SNP gene loci in repeated regions, and thus can be used to estimate kinship even when there is mutations within CODIS-23 loci.

[0021] In particular, compared to kinship testing using the conventional STR markers or about 10⁵ to 10⁶ SNPs, the composition for kinship identification in Korean according to the present invention is practical in forensic applications in that it permits the use of only 918 and/or 482 SNP markers to distinguish, with respect to a test person, first-degree relatives from those who are not first-degree relatives in a Korean population.

[0022] The terms “nucleotide sequence analysis”, “sequencing”, and “genome decoding” as used herein have no intended distinction and are used interchangeably in this specification.

[0023] The term “single nucleotide polymorphism (SNP)” refers to a variation of a single base at a specific position in the genome. The SNP is intended to encompass variations of a specific single base to another base at the same position in the genome of several individuals.

[0024] The term “panel” as used herein refers to a set of specific markers.

[0025] The term “SNP panel” as used herein refers to a set of specific SNP markers.

[0026] The term “whole genome sequencing (WGS)” as used herein refers to a method of determining the exact sequence of nucleotides of a genome, which is the sum total of genetic material of a cell or an organism.

[0027] In an embodiment of the present invention, the composition comprises an agent for amplifying or detecting an SNP located at position 101 in a sequence selected from the group consisting of nucleotide sequences set forth as SEQ ID NO: 1 to SEQ ID NO: 918.

[0028] In another embodiment of the present invention, the composition comprises an agent for amplifying or detecting an SNP located at position 101 in at least 100, at least 200, at least 300, at least 400, at least 500, at least 600, at least 700, at least 800, at least 900, or 918 sequences in a sequences selected from the group consisting of nucleotide sequences set forth as SEQ ID NO: 1 to SEQ ID NO: 918, but these numbers are only exemplary and are not limited thereto.

[0029] In an embodiment of the present invention, the composition further comprises an agent for amplifying or detecting an SNP located at position 101 in a sequence selected from the group consisting of nucleotide sequences set forth as SEQ ID NO: 919 to SEQ ID NO: 1400.

[0030] In another embodiment of the present invention, the composition comprises an agent for amplifying or detecting an SNP located at position 101 in at least 50, at least 100, at least 150, at least 200, at least 250, at least 300, at least 350, at least 400, at least 450, or 482 sequences in nucleotide sequences selected from the group consisting of nucleotide sequences set forth as SEQ ID NO: 919 to SEQ ID NO: 1400, but these numbers are only exemplary and are not limiting to.

[0031] In another embodiment of the present invention, the composition comprises an agent for amplifying or detecting an SNP located at position 101 in a sequence selected from the group consisting of nucleotide sequences set forth as SEQ ID NO: 1 to SEQ ID NO: 1400.

[0032] In an embodiment of the present invention, the composition comprises an agent for amplifying or detecting an SNP located at position 101 in at least 100, at least 200, at least 300, at least 400, at least 500, at least 600, at least 700, at least 800, at least 900, or 918 sequences selected from the group consisting of nucleotide sequences set forth as SEQ ID NO: 1 to SEQ ID NO: 918; and/or an agent for amplifying or detecting an SNP located at position 101 in at least 50, at least 100, at least 150, at least 200, at least 250, at least 300, at least 350, at least 400, at least 450, or 482 sequences selected from the group consisting of nucleotide sequences set forth as SEQ ID NO: 919 to SEQ ID NO: 1400, but these numbers are only exemplary and are not limiting to.

[0033] In another embodiment of the present invention, the composition comprises an agent for amplifying or detecting an SNP located at position 101 in at least 100, at least 200, at least 300, at least 400, at least 500, at least 600, at least 700, at least 800, at least 900, at least 1000, at least 1100, at least 1200, at least 1300, or 1400 sequences selected from the group consisting of nucleotide sequences set forth as SEQ ID NO: 1 to SEQ ID NO: 1400.

[0034] The SNP can be extracted from a human reference genome, such as GRCh37/hg19 or GRCh38/hg38.

[0035] The term “reference genome” as used herein refers to a standard sequence that is completely sequenced and established as a public database.

[0036] In an embodiment of the present invention, the SNP is not located within a region of genome functional element, or between 100 kbp (kilo base pair) upstream and 100 kbp downstream therefrom.

[0037] In a specific embodiment of the present invention, the genome functional element is an exon or a coding sequence. That is, the SNP of the present invention is not located in exons or coding sequences.

[0038] In another specific embodiment of the present invention, the SNP is not located within an exon or a coding sequence, or between 100 kbp upstream and 100 kbp downstream therefrom.

[0039] In an embodiment of the present invention, the SNP has a p value of 0.05 or more from Hardy-Weinberg equilibrium (HWE) testing. In another embodiment of the present invention, the SNP has a p value of more of 0.05 from HWE testing.

[0040] In an embodiment of the present invention, the SNP is extracted from KoVariome, which is Korea National Standard Reference Variome database, but is not necessarily limited thereto. Details on KoVariome are disclosed in Kim J. et al. (KoVariome: Korean National Standard Reference Variome database of whole genomes with comprehensive SNV, indel, CNV, and SV analyses. Sci Rep. 2018 Apr. 4; 8(1):5677).

[0041] In an embodiment of the present invention, the variant allele frequency in Korean population with respect to the SNP is 0.3 to 0.7. In another embodiment of the present invention, the variant allele frequency in Korean population with respect to the SNP is 0.4 to 0.6.

[0042] In a specific embodiment of the present invention, the SNP is an SNP having a variant allele frequency in Korean population of 0.3 to 0.7, or 0.4 to 0.6, extracted from KoVariome which is Korea National Standard Reference Variome database.

[0043] The term “variant allele frequency (VAF)” as used herein refers to a frequency at which the alleles are observed at particular loci in the genome. For the purpose of the present invention, the term variant allele frequency refers to a frequency at which a variant allele appears at a particular gene locus specific to the genome in a Korean population.

[0044] In an embodiment of the present invention, the SNP is not located in linkage disequilibrium (LD). In another embodiment of the present invention, the SNP excludes SNPs located in LD, which are excluded by using HaploReg v 4.1 database (Ward, L. D., & Kellis, M. (2016). HaploReg v 4: systematic mining of putative causal variants, cell types, regulators and target genes for human complex traits and disease. Nucleic Acids Res., 44(D1), D877-D881. http://compbio.mit.edu/HaploReg). In one specific embodiment of the present invention, the excluding SNPs located in LD by using HaploReg v 4.1 database is excluding SNPs having an r² value of 0.2 or more.

[0045] In an embodiment of the present invention, the SNP is not located in repeated regions in the genome known in the art. In another embodiment of the present invention, the SNP excludes SNPs located in repeated regions disclosed in www.repeatmasker.org/species/hg.html.

[0046] In an embodiment of the present invention, the agent is a primer, a probe, or a mixture thereof.

[0047] The term “primer” as used herein refers to an oligonucleotide, which is capable of acting as a point of initiation of synthesis when placed under conditions in which synthesis of primer extension product complementary to a nucleic acid strand (template) is induced, i.e., in the presence of nucleotides and an agent for polymerization, such as DNA polymerase, and at a suitable temperature and pH.

[0048] The term “probe” as used herein refers to a single-stranded nucleic acid molecule including a portion or portions that are substantially complementary to a target nucleic acid sequence. The probe may be labeled with a fluorescent material and/or a quencher.

[0049] The reporter molecule and the quencher molecule useful in the present invention may include any molecules known in the art, for example, following molecules (the numeric in parenthesis is a maximum emission wavelength in nanometer): Cy2™(506), YOPRO™-1(509), YOYO™-1(509), Calcein(517), FITC(518), FluorX™(519), Alexa™(520), rhodamine 110(520), 5-FAM(522), Oregon Green™500(522), Oregon Green™488(524), RiboGreen™(525), RhodamineGreen™(527), Rhodamine 123(529), Magnesium Green™(531), Calcium Green™(533), TO-PRO™-1(533), TOTO1(533), JOE(548), BODIPY530/550(550), Dil(565), BODIPY TMR(568), BODIPY558/568(568), BODIPY564/570(570), Cy3™(570), Alexa™546(570), TRITC(572), Magnesium Orange™(575), Phycoerythrin R&B(575), Rhodamine Phalloidin(575), Calcium Orange™(576), Pyronin Y(580), RhodamineB(580), TAMRA(582), Rhodamine Red™(590), Cy3.5™(596), ROX(608), Calcium Crimson™(615), Alexa™594(615), Texas Red(615), Nile Red(628), YO-PRO™_3(631), YYO™-3(631), Rphycocyanin(642), CPhycocyanin(648), TO-PRO™-3(660), TOTO3(660), DiD DiIC(5)(665), Cy5™(670) Thiadicarbocyanine(671), Cy5.5(694), HEX(556), TET(536), VIC(546), BHQ-1(534), BHQ-2(579), BHQ-3(672), BiosearchBlue(447), CAL Fluor Gold 540(544), CAL Fluor Orange 560(559), CAL Fluor Red 590(591), CAL FluorRed 610(610), CAL Fluor Red 635(637), FAM(520), Fluorescein(520), Fluorescein-C3(520), Pulsar 650(566), Quasar 570(667), Quasar 670(705), Quasar 705(610), and TxR(592).

[0050] Suitable pairs of reporter-quencher are disclosed in a variety of publications as follows: Pesce et al., editors, FLUORESCENCE SPECTROSCOPY (Marcel Dekker, New York, 1971); White et al., FLUORESCENCE ANALYSIS: A PRACTICAL APPROACH (Marcel Dekker, New York, 1970); Berlman, HANDBOOK OF FLUORESCENCE SPECTRA OF AROMATIC MOLECULES, 2nd EDITION (Academic Press, New York, 1971); Griffiths, COLOUR AND CONSTITUTION OF ORGANIC MOLECULES (Academic Press, New York, 1976); Bishop, editor, INDICATORS (Pergamon Press, Oxford, 1972); Haugland, HANDBOOK OF FLUORESCENT PROBES AND RESEARCH CHEMICALS (Molecular Probes, Eugene, 1992); Pringsheim, FLUORESCENCE AND PHOSPHORESCENCE (Interscience Publishers, New York, 1949); Haugland, R. P., HANDBOOK OF FLUORESCENT PROBES AND RESEARCH CHEMICALS, Sixth Edition, Molecular Probes, Eugene, Oreg., 1996; U.S. Pat. Nos. 3,996,345 and 4,351,760.

[0051] The “target nucleic acid”, “target nucleic acid sequence”, or “target sequence” refers to a nucleic acid sequence sought to be detected, and is annealed or hybridized with a primer or a probe under hybridization, annealing or amplification conditions.

[0052] More specifically, the probe and primer are single-stranded deoxyribonucleotide molecules. The probes or primers used in this invention may include naturally occurring dNMP (i.e., dAMP, dGM, dCMP and dTMP), modified nucleotide, or non-naturally occurring nucleotide. The probes or primers may also include ribonucleotides.

[0053] The primer must be sufficiently long to prime the synthesis of extension products in the presence of the agent for polymerization. The exact length of the primers depends on multiple factors, including temperature, the field of application, and the source of primer.

[0054] The term “annealing” or “priming” as used herein refers to the apposition of an oligodeoxynucleotide or nucleic acid to a template nucleic acid, whereby the apposition enables the polymerase to polymerize nucleotides into a nucleic acid molecule which is complementary to the template nucleic acid or a portion thereof.

[0055] A primer used in the present invention is hybridized or annealed to a portion of the template to form a double-stranded structure. Conditions for nucleic acid hybridization suitable for forming such a double-stranded structure are disclosed in Joseph Sambrook, et al., Molecular Cloning, A Laboratory Manual, Cold Spring Harbor Laboratory Press, Cold Spring Harbor, N.Y. (2001) and Haymes, B. D., et al., Nucleic Acid Hybridization, A Practical Approach, IRL Press, Washington, D.C. (1985).

[0056] The term used “hybridizing” used herein refers to the formation of a double-stranded nucleic acid from complementary single stranded nucleic acids. The hybridization may occur between two nucleic acid strands perfectly matched or substantially matched with some mismatches. The complementarity for hybridization may depend on hybridization conditions, particularly temperature. As used herein, there is no intended distinction between the terms “annealing” and “hybridizing”, and these terms will be used interchangeably.

[0057] In an embodiment of the present invention, the SNP is amplified or detected by the primer or probe.

[0058] By using the primer and/or probe, a nucleotide sequence containing the SNP according to the present invention may be amplified or detected.

[0059] The application is performed by amplification of a gene.

[0060] In an embodiment of the present invention, the amplification of a gene is performed by a polymerase chain reaction (PCR) method.

[0061] In an embodiment of the present invention, the PCR simultaneously amplifies or detects an SNP located at 101 base position in at least 1, at least 10, at least 100, at least 200, at least 300, at least 400, at least 500, at least 600, at least 700, at least 800, at least 900, or 918 sequences selected from the group consisting of nucleotide sequences set forth as SEQ ID NO: 1 to SEQ ID NO: 918.

[0062] In an embodiment of the present invention, the PCR simultaneously amplifies or detects an SNP located at 101 base position in at least 1, at least 10, at least 50, at least 100, at least 150, at least 200, at least 250, at least 300, at least 350, at least 400, at least 450, or 482 sequences selected from the group consisting of nucleotide sequences set forth as SEQ ID NO: 919 to SEQ ID NO: 1400.

[0063] In another embodiment of the present invention, the PCR simultaneously amplifies or detects an SNP located at 101 base position in at least 1, at least 10, at least 100, at least 200, at least 300, at least 400, at least 500, at least 600, at least 700, at least 800, at least 900, at least 1,000, at least 1,100, at least 1,200, at least 1,300, or 1,400 sequences selected from the group consisting of nucleotide sequences set forth as SEQ ID NO: 1 to SEQ ID NO: 1400.

[0064] The PCR is the most well-known method of amplification of nucleic acids and has many variations and applications developed. For example, to enhance PCR specificity or sensitivity, variations of the conventional PCR protocol have been developed, examples of such variations being touchdown PCR, hot start PCR, nested PCR, and booster PCR. Furthermore, real-time PCR, differential display PCR (DD-PCR), rapid amplification of cDNA ends (RACE), multiplex PCR, inverse polymerase chain reaction (IPCR), vectorette PCR, thermal asymmetric interlaced PCR (TAIL-PCR), and multiplex PCR have been developed for specific applications. Details of the PCR are described in McPherson, M. J. and Moller, S. G. PCR. BIOS Scientific Publishers, Springer-Verlag New York Berlin Heidelberg, N.Y. (2000), and the teachings thereof are incorporated herein by reference.

[0065] The term “multiplex PCR” as used herein refers to a simultaneous amplification of multiple targets by a polymerase chain reaction in a reaction vessel.

[0066] In the polymerase chain reaction, various DNA polymerases may be used, and such DNA polymerases include Klenow fragment of E. coli DNA polymerase I, a thermostable DNA polymerase and bacteriophage T7 DNA polymerase. In particular, the polymerase is a thermostable DNA polymerase which may be obtained from a variety of bacterial species, including Thermus aquaticus (Taq), Thermus thermophilus (Tth), Thermus filiformis, Thermis flavus, Thermococcus literalis, and Pyrococcus furiosus (Pfu).

[0067] In an embodiment of the present invention, the composition comprises a Taq DNA polymerase or a Pfu DNA polymerase.

[0068] Products from the PCR may be replicated by rolling circle replication (RCA).

[0069] By using the products from the PCR, DNA nanoball sequencing may be performed.

[0070] As used herein, the term “DNA nanoball sequencing” refers to a high throughput sequencing technology that is used to analyze the entire genomic sequence by using RCA (rolling circle replication) to amplify DNA fragments to form a DNA concatemer in which DNA copies concatenate head to tail in a long strand and are compacted.

[0071] In an embodiment of the present invention, the agent for amplifying or detecting the SNP may be a primer, an oligomer, an adapter, a barcode sequence, or an index sequence for sequencing.

[0072] In an embodiment of the present invention, the primer, oligomer, adaptor, barcode sequence, or index sequence for sequencing may include at least 10 consecutive nucleotides that comprise an SNP located at 101 base position in nucleotide sequences set forth in SEQ ID NO: 1 to SEQ ID NO: 918 and/or SEQ ID NO: 919 to SEQ ID NO: 1400, or may comprise a nucleotide sequence complementary thereto.

[0073] The adaptor for sequencing may be designed so as to be complementary to a sequence coating a flow cell for sequencing. DNA in a sample may be attached to the flow cell and then synthesized and sequenced.

[0074] The barcode sequence or index sequence for sequencing may be used to multiplex DNA in multiple samples or DNA libraries obtained therefrom. Indexing DNA in samples or DNA libraries obtained therefrom by the barcode sequence or index sequence allows multiple samples or DNA libraries obtained therefrom to be pooled and sequenced simultaneously. The above-described indexing may be applied as single indexing or dual indexing technique.

[0075] The composition for kinship identification in Korean according to the present invention, which comprises an agent for amplifying or detecting an SNP located at 101 base position in at least one sequence, or all sequences from the group consisting of nucleotide sequences set forth as SEQ ID: 1 to SEQ ID NO: 918 and/or SEQ ID NO: 919 to SEQ ID NO: 1400, may be used in sequencing platforms known in the art, for example, including but not limited to, Illumina®, Thermo Fisher Scientific Ion Torrent™, Helicos Biosciences tSMS (true Single Molecule Sequencing), PacBio SMRT™ (Single-molecule real time), GridION™, and MinION™.

[0076] The term “first-degree relative” as used herein refers to any one of a subject's parent, child, brother, sister, and siblings. The term “first-degree relative” as used herein may be abbreviated as first-d-r.

[0077] The term “second-degree relative” as used herein refers to any one of a subject's maternal aunts, uncles, paternal aunts, grandparents, half-brothers, half-sisters, and half-siblings. The term “second-degree relative” as used herein may be abbreviated as second-d-r.

[0078] The term “third-degree relative” as used herein refers to a subject's first cousins. The term “third-degree relative” as used herein may be abbreviated as third-d-r.

[0079] In an embodiment of the present invention, the kinship is any one of a subject's parent, child, brother, sister, and sibling. That is, the kinship is any one of the subject's parent, child, brother, sister, and sibling. By using the composition for kinship identification in Korean according to the present invention, it is possible to distinguish a first-d-r individual that is in any one of parent, child, brother, sister, and sibling relationships with a subject, from non-first-d-r individuals. That is, the composition according to the present invention may distinguish a person who is in any one of parent, child, brother, sister, and sibling relationships with a subject, from unrelated persons.

[0080] In another embodiment of the present invention, the kinship is any one of a subject's brother, sister, and sibling. By using the composition for kinship identification in Korean according to the present invention, it is possible to distinguish a first-d-r individual that is in any one of brother, sister, and sibling relationships with a subject, from non-first-d-r individuals. That is, the composition according to the present invention can distinguish a person who is in any one of brother, sister, and sibling relationships with a subject, from unrelated persons, even when there is no parent's DNA information available.

[0081] In another embodiment of the present invention, the kinship is a relationship within 2-chon relatives based on the Korean kinship system, namely, parent-child relationship, monozygotic twin relationship, or full-sibling relationship. The composition for kinship identification in Korean according to the present invention may be used to distinguish individuals who are within 2-chon relationships, from individuals who are not within 2-chon relationships.

[0082] In an embodiment of the present invention, the composition for kinship identification in Korean, comprising an agent for amplifying or detecting an SNP located at position 101 in at least one sequence from among nucleotide sequences set forth in SEQ ID NO: 1 to SEQ ID NO: 918, can distinguish a person who is in any one of parent, child, brother, sister, and sibling relationships with a subject, from those who are not in any of the aforementioned relationships.

[0083] In another embodiment of the present invention, the composition for kinship identification in Korean, comprising an agent for amplifying or detecting an SNP located at position 101 in at least one sequence from among nucleotide sequences set forth in SEQ ID NO: 919 to SEQ ID NO: 1400, can distinguish a person who is in any one of parent, child, brother, sister, and sibling relationships with a subject, from those who are not in any of the aforementioned relationships.

[0084] In yet another embodiment of the present invention, the composition for kinship identification in Korean, comprising an agent for amplifying or detecting an SNP located at position 101 in at least one sequence from among nucleotide sequences set forth in SEQ ID NO: 1 to SEQ ID NO: 1400, can distinguish a person who is in any one of parent, child, brother, sister, and sibling relationships with a subject, from those who are not in any of the aforementioned relationships.

[0085] According to another aspect of the present invention, the present invention provides a marker composition for kinship identification in Korean, the marker composition comprising:
[0086] 1) a polynucleotide comprising at least 10 consecutive nucleotides including an SNP located at position 101 in at least one sequence selected from the group consisting of nucleotide sequences set forth as SEQ ID NO: 1 to SEQ ID NO: 918, or a polynucleotide complementary thereto;
[0087] 2) a polynucleotide comprising at least 10 consecutive nucleotides including an SNP located at position 101 in at least one sequence selected from the group consisting of nucleotide sequences set forth as SEQ ID NO: 919 to SEQ ID NO: 1400, or a polynucleotide complementary thereto; or
[0088] 3) a polynucleotide comprising at least 10 consecutive nucleotides including an SNP located at position 101 in at least one sequence selected from the group consisting of nucleotide sequences set forth as SEQ ID NO: 1 to SEQ ID NO: 1400, or a polynucleotide complementary thereto.

[0089] In an embodiment of the present invention, the marker composition comprises a polynucleotide comprising at least 10 consecutive nucleotides including an SNP located at position 101 in any of sequences selected from the group consisting of nucleotide sequences set forth as SEQ ID NO: 1 to SEQ ID NO: 918, or comprises a polynucleotide complementary thereto.

[0090] In an embodiment of the present invention, the marker composition comprises a polynucleotide comprising at least 10 consecutive nucleotides including an SNP located at position 101 in at least 100, at least 200, at least 300, at least 400, at least 500, at least 600, at least 700, at least 800, at least 900, or 918 sequences selected from the group consisting of nucleotide sequences set forth as SEQ ID NO: 1 to SEQ ID NO: 918, or comprises a polynucleotide complementary thereto.

[0091] In another embodiment of the present invention, the marker composition comprises a polynucleotide comprising at least 10 consecutive nucleotides including an SNP located at position 101 in any of sequences selected from the group consisting of nucleotide sequences set forth as SEQ ID NO: 919 to SEQ ID NO: 1400, or comprises a polynucleotide complementary thereto.

[0092] In an embodiment of the present invention, the marker composition comprises a polynucleotide comprising at least 10 consecutive nucleotides including an SNP located at position 101 in at least 50, at least 100, at least 150, at least 200, at least 250, at least 300, at least 350, at least 400, at least 450, or 482 sequences selected from the group consisting of nucleotide sequences set forth as SEQ ID NO: 919 to SEQ ID NO: 1400, or comprises a polynucleotide complementary thereto.

[0093] In yet another embodiment of the present invention, the marker composition comprises a polynucleotide comprising at least 10 consecutive nucleotides including an SNP located at 101 base position in any of sequences selected from the group consisting of nucleotide sequences set forth as SEQ ID NO: 1 to SEQ ID NO: 1400, or comprises a polynucleotide complementary thereto.

[0094] In an embodiment of the present invention, the marker composition comprises a polynucleotide comprising at least 10 consecutive nucleotides including an SNP located at 101 base position in at least 1, at least 10, at least 100, at least 200, at least 300, at least 400, at least 500, at least 600, at least 700, at least 800, at least 900, at least 1,000, at least 1,100, at least 1,200, at least 1,300, or 1,400 sequences selected from the group consisting of nucleotide sequences set forth as SEQ ID NO: 1 to SEQ ID NO: 1400, or comprises a polynucleotide complementary thereto.

[0095] The marker composition for kinship identification in Korean of the present invention comprises an SNP that is amplified or detected by an agent comprised in the above-described composition for kinship identification in Korean according to another aspect, any description that may be redundant will be omitted for clarity of this specification.

[0096] According to another aspect of the present invention, the present invention provides a kit for kinship identification in Korean, comprising the above-described composition for kinship identification in Korean.

[0097] In an embodiment of the present invention, the kit is a microarray. The kit may be used for sequencing.

[0098] The microarray may have a polynucleotide comprising the above-described SNP, or a polynucleotide complementary thereto, arranged at high density in a specific area of substrate surface. In particular, in the microarray, a polynucleotide comprising at least 10 consecutive nucleotide sequences containing an SNP located at 101 base position in at least one sequence selected from the group consisting of nucleotide sequences set forth as of SEQ ID NO: 1 to SEQ ID NO: 918 and/or SEQ ID NO: 919 to SEQ ID NO: 1400, or a nucleotide sequence complementary thereto, may be arranged at high density.

[0099] The flow cell may be a glass with a well having a nano-scale diameter. In the well, a DNA probe capable of detecting or amplifying the above-described SNP in the composition for kinship identification in Korean is comprised, or a primer that hybridizes to the above-described SNP is attached.

[0100] The kit may further comprise the reagents required for detection or amplification of the above-described SNP, for example, but not limited to, dNTP, DNA polymerases such as Taq DNA polymerase and ϕ29 DNA polymerase, distilled water, Tris-HCl, KCl (potassium chloride), MgCl₂ (magnesium chloride), and the like.

[0101] In addition, the kit may further comprise the equipment required for detection or amplification of the above-described SNP, for example, but not limited to, a thermocycler, a PCR system, a sequencer, and the like.

[0102] Furthermore, the primer attached to the well of the kit hybridizes with the SNP in a sample or an adaptor connected to the SNP, and a kinship may be identified from the results of the hybridization. The kit may further comprise the reagents required for hybridization of primers and the SNP or adaptors linked to the SNP, examples being but not limited to T4 DNA polymerase for repairing DNA fragments containing SNPs to blunt ends, Klenow fragments, T4 polynucleotide kinases, dATP for A-tailing, DNA ligase for ligation of adaptors to DNA fragments including SNPs, an index primer capable of amplifying DNA fragments ligated with adaptors, and the like.

[0103] The kit for kinship identification in Korean comprises the above-described composition for kinship identification in Korean according to another aspect, and thus any description that may be redundant will be omitted for clarity of this specification.

[0104] According to another aspect of the present invention, the present invention provides a method of kinship identification in Korean, the method comprising:
[0105] (1) identifying a nucleotide of an SNP located at position 101 in at least one sequence selected from the group consisting of nucleotide sequences set forth as SEQ ID NO: 1 to SEQ ID NO: 918, in samples isolated from two or more individuals whose kinship is to be identified; or
[0106] (2) identifying a nucleotide of an SNP located at position 101 in at least one sequence selected from the group consisting of nucleotide sequences set forth as SEQ ID NO: 919 to SEQ ID NO: 1400, in samples isolated from two or more individuals whose kinship is to be identified.

[0107] The method of determining the type of base, that is, the identity of nucleotide at the SNP site may be any method known in the art, examples including, but not limited to any known sequencing method, Sanger sequencing, Maxam-Gilbert Sequencing, capillary electrophoresis and fragment analysis, and next-generation sequencing (NGS). Preferably, the identity of nucleotide at the SNP site is determined by NGS, and more information can be found in literature (Metzker M L. Sequencing technologies—the next generation. Nat Rev Genet. 2010 January; 11(1l):31-46; Børsting C, Morling N. Next generation sequencing and its applications in forensic genetics. Forensic Sci Int Genet. 2015 September; 18:78-89; and Alvarez-Cubero M J et al. Next generation sequencing: an application in forensic sciences?Ann Hum Biol. 2017 November; 44(7):581-592).

[0108] In addition, the type of nucleotide at the SNP site may be determined by hybridizing a probe or primer complementary to an SNP flanking sequence of 10 bp to 25 bp, located between 20 bp upstream and 20 bp downstream from the SNP site and including the SNP, to a DNA fragment including the target SNP, and analyzing the results of the hybridization.

[0109] In an embodiment of the present invention, the above method further comprises:

[0110] In case of (1) above, identifying the SNP located at position 101 in at least one sequence selected from the group consisting of nucleotide sequences set forth as SEQ ID NO: 919 to SEQ ID NO: 1400; or
[0111] in case of (2) above, identifying the nucleotide of the SNP located at position 101 in at least one sequence selected from the group consisting of nucleotide sequences set forth as SEQ ID NO: 1 to SEQ ID NO: 918.

[0112] In an embodiment of the present invention, the method comprises identifying the SNP located at position 101 in at least 100, at least 200, at least 300, at least 400, at least 500, at least 600, at least 700, at least 800, at least 900, or 918 sequences selected from the group consisting of nucleotide sequences set forth as SEQ ID NO: 1 to SEQ ID NO: 918, in a sample isolated from the two or more individuals whose kinship is to be identified.

[0113] In another embodiment of the present invention, the method comprises identifying the SNP located at position 101 in at least 50, at least 100, at least 150, at least 200, at least 250, at least 300, at least 350, at least 400, at least 450, or 482 sequences selected from the group consisting of nucleotide sequences set forth as SEQ ID NO: 919 to SEQ ID NO: 1400, in a sample isolated from the two or more individuals whose kinship is to be identified.

[0114] In another embodiment of the present invention, the method comprises identifying the SNP located at position 101 in at least 1, at least 10, at least 100, at least 200, at least 300, at least 400, at least 500, at least 600, at least 700, at least 800, at least 900, at least 1000, at least 1100, at least 1200, at least 1300, or 1400 sequences selected from the group consisting of nucleotide sequences set forth as SEQ ID NO: 1 to SEQ ID NO: 1400, in a sample isolated from the two or more individuals whose kinship is to be identified.

[0115] In another embodiment of the present invention, the method comprises identifying the SNP located at position 101 in nucleotide sequences set forth as SEQ ID NO: 1 to SEQ ID NO: 1400 in samples isolated from the two or more individuals whose kinship is to be identified.

[0116] In an embodiment of the present invention, the kinship is any one of a subject's parent, child, brother, sister, and sibling. That is, by using the present invention, it is possible to distinguish a person who is in any one of parent, child, brother, sister, and sibling relationships with a subject, from unrelated persons.

[0117] In an embodiment of the present invention, the kinship is any one of a subject's brother, sister, and sibling. That is, by using the present invention, it is possible to distinguish a person who is in any one of brother, sister, and sibling relationships with a subject, from unrelated persons. The method according to the present invention can distinguish a person who is in any one of brother, sister, and sibling relationships from unrelated persons even when there is no parental DNA information.

[0118] In an embodiment of the present invention, the identifying the SNP is amplifying or detecting the SNP by using a primer, a probe, or a mixture thereof.

[0119] In another embodiment of the present invention, the identifying the SNP is amplifying or detecting the SNP by using an oligomer or primer for sequencing.

[0120] In a specific embodiment of the present invention, the method further comprises, after the identifying the SNP, making pairwise comparison of each SNP in each sample.

[0121] In a specific embodiment of the present invention, the making pairwise comparison of each SNP in each sample comprises calculating a kinship coefficient or coefficient of relatedness, as known in the art.

[0122] In a specific embodiment of the present invention, the kinship coefficient or coefficient of relatedness may be calculated by IBS (identify by state) scoring, IBD (identical by descent) scoring, or likelihood ratio (LR). As for methods of measuring/calculating IBD, IBS, and/or LR from SNP data, and calculating therefrom a kinship coefficient or coefficient of relatedness, more information can be found in various literature (Frudakis T et al. A classifier for the SNP-based inference of ancestry. J Forensic Sci. 2003 July; 48(4):771-82. Erratum in: J Forensic Sci. 2004 September; 49(5):1145-6; Stevens E L et al. Inference of relationships in population data using identity-by-descent and identity-by-state. PLoS Genet. 2011 September; 7(9):e1002287; Browning B L, Browning S R. A fast, powerful method for detecting identity by descent. Am J Hum Genet. 2011 Feb. 11; 88(2):173-82; Zheng X et al. A high-performance computing toolset for relatedness and principal component analysis of SNP data. Bioinformatics. 2012 Dec. 15; 28(24):3326-8; and Browning B L, Browning S R. Improving the accuracy and efficiency of identity-by-descent detection in population data. Genetics. 2013 June; 194(2):459-71).

[0123] As described in one example of the present invention, kinship coefficient or coefficient of relatedness can be extracted from 918- and/or the 482-SNP panel of the present invention by using Somalier program disclosed in Pedersen et al. 2020 (Somalier: rapid relatedness estimation for cancer and germline studies using efficient genome sketches. Genome medicine, 12(1), 1-9). However, the method by which a kinship coefficient or coefficient of relatedness can be extracted is not limited thereto, and any method known in the art of obtaining a kinship coefficient or coefficient of relatedness from SNP data may be applied to the present invention.

[0124] In an specific embodiment, the making pairwise comparison for each SNP nucleotide in each sample includes the following steps:
[0125] (a) i) when all nucleotides of the SNP identified from two alleles in two samples being pairwise compared are identical, assigning an IBS (identity by state) score of 2 to the SNP, ii) when only one nucleotide of the SNP is identical between two alleles in two samples being pairwise compared, assigning an IBS score of 1 to the SNP, or iii) when all nucleotides of the SNP identified from two alleles in two samples being pairwise compared are different, assigning an IBS score of 0 to the SNP; and
[0126] (b) obtaining an average of the IBS scores of all the SNPs being compared pairwise. In an specific embodiment of the present invention, when the average of IBS score from the (b) obtaining an average is 0.300 to 0.700, there is provided information that the two individuals from which the two samples pairwise compared were isolated are in any one of kinship selected from the group consisting of parent, child, brother, sister, and sibling relationships; or
[0127] when the average IBS score obtained from the (b) obtaining an average is less than 0.300, there is provided information indicating that the two individuals from which the two samples pairwise compared were isolated are not in any one of kinship selected from the group consisting of parent, child, brother, sister, and sibling.

[0128] In another specific embodiment of the present invention, when the average IBS score is from 0.380 to 0.700, there is provided information that the two individuals from which the two samples pairwise compared were isolated are in any one of kinship selected from the group consisting of parent, child, brother, sister, and sibling relationships; or
[0129] when the average IBS score is less than 0.380, there is provided information that the two individuals from which the two samples pairwise compared were isolated are not in any of kinship selected from the group consisting of parent, child, brother, sister, and sibling relationships.

[0130] The subject whose kinship is to be identified may be two individuals. The subject whose kinship is to be identified may be two or more individuals.

[0131] In an embodiment of the present invention, the subject whose kinship is to be identified may be at least 2 individuals, at least 10 individuals, at least 20 individuals, at least 40 individuals, at least 50 individuals, or at least 100 individuals. In another embodiment of the present invention, the subject whose kinship is to be identified may be, but is not limited to, 2 individuals to 10 individuals, 2 individuals to 20 individuals, 2 individuals to 40 individuals, 2 individuals to 50 individuals, or 2 individuals to 100 individuals. Here, those skilled in the art would appreciate that citing these aforementioned numbers is not to limit the number of individuals whose kinship is to be identified. The subject whose kinship is to be identified comprises missing persons, unknown corpses, person with unconfirmed identity with no living parents, war casualties, the dead and wounded in massive disaster events, incident victims, human remains, the surviving family members thereof, or potential surviving family members thereof. However, the subject whose kinship is to be identified may include a far greater number of individuals than those aforementioned if need be.

[0132] In addition, the number of individuals whose kinship is to be identified may be determined based on factors such as the performance of the sequencing platform used, the size of the final output (Gb, giga base) of sequencing, the quality, purity, and DNA yield of the samples being analyzed, and the like. The final output (Gb) of sequencing may be determined according to the number of amplicons, and the size and coverage of amplicons. For example, if the final output of sequencing is about 1 Gb, the subject whose kinship is to be identified may be at least 10 individuals, but is not necessarily limited thereto. As an another example, if the purity and yield of DNA isolated from a blood sample from a particular subject are sufficiently high, the user may select a smaller final output of sequencing to thereby increase the number of individuals whose kinship is to be identified with respect to that particular subject and may proceed the sequencing by selecting indexing combination of individuals. The user ultimately can adjust sequencing quality and adjust the possible number of individuals that can be analyzed by selecting the size of final output of sequencing, selecting the sequencing equipment with appropriate performance, or adjusting the sequencing running time in accordance with the purpose of kinship identification, or the purity and yield of a sample to be analyzed.

[0133] The subject is a human. The subject is a Korean individual. The subject may be a native or resident of the Korean peninsula, or may be a Korean descent who does not reside in the Korean peninsula. The subject may be but is not limited to, a missing person, an unknown corpse, a person with unconfirmed identity with no living parents, war casualties, the dead and wounded in massive disaster events, an incident victim, human remains, the surviving family members thereof, potential surviving family members, or the like.

[0134] The sample may be a cell, a tissue, an organ, or bodily fluid isolated from the subject. The sample may be a naturally existing sample, a human remain sample from old human remains, a sample obtained from a forensic site, an archeological sample such as mummified tissues, a refrigerated or frozen sample, a sample fixed by fixer such as formalin, a sample embedded in paraffin, or a sample treated with preservatives. The sample includes but is not necessarily limited to, oral swab, a vaginal swab, a rectal swab, saliva, sweat, urine, feces, mucus, semen, blood, plasma, serum, bloodstain, cerebrospinal fluid, ascites, amniotic fluid, tears, discharges, bones, and the like.

[0135] In another embodiment of the present invention, the method of kinship identification in Korean comprises the following:
[0136] 1) isolating DNA from at least two Korean individuals whose kinship is to be identified;
[0137] 2) identifying an SNP located at position 101 of nucleotide sequences set forth as SEQ ID NO: 1 to SEQ ID NO: 918 in the DNA;
[0138] 3) inputting data regarding the identity of nucleotide at the SNP to a computer-readable medium in which information of the SNP located at position 101 in the nucleotide sequences set forth as SEQ ID NO: 1 to SEQ ID NO: 918;
[0139] 4) calculating an average IBS score between two Korean individuals by using the computer-readable medium; and
[0140] 5) providing information that the two Korean individuals have a kinship that is any one of parent, child, brother, sister, and sibling if the average IBS score is between 0.3000 and 0.7000, or providing information that the two Korean individuals do not have a kinship that is any one of parent, child, brother, sister, and sibling if the average IBS score is less than 0.300.

[0141] The computer-readable medium may be those available online, such as PLINK (zzz.bwh.harvard.edu/plink/) (Purcell et al. 2007), KING (Kinship-based Inference for Gwas) (https://www.kingrelatedness.com/) but is not necessarily limited thereto and rather, any medium that is capable of calculating kinship coefficients or coefficients of relatedness from inputted SNP panel information and DNA sequencing data may be used without limitation. In addition, the computer-readable medium may be Somalier program (Pedersen et al. 2020).

[0142] The SNP information input to the computer-readable medium may include but are not limited to the chromosome number on which the SNP is located, the position on the chromosome, and SNP's unique identification number such as dbSNP rs number, reference alleles that appear on a reference genome at the SNP position, alternative alleles that appear at the SNP position, and the like.

[0143] As used herein, the term “reference allele (ref. allele)” refers to a base found at a corresponding locus in the reference genome. The reference allele does not always mean that it is the major allele.

[0144] As used herein, the term “alternative allele (alt. allele)” refers to any base other than the base in the reference allele defined above, that is found at the given locus.

[0145] Based on information of 918 and/or 482 SNPs inputted, the computer-readable medium makes pairwise comparison of sequencing data of DNA isolated from at least two Korean individuals, that is, makes pairwise comparison of nucleotides at a specific SNP position, to calculate IBS (identity by state), IBD (identical by descent), or likelihood ratio (LR) values. An average value of the calculated IBS, IBD or LR values is taken and a kinship coefficients or coefficient of relatedness is extracted therefrom.

[0146] In another specific embodiment of the present invention, the method of kinship identification in Korean comprising the 2) identifying an SNP located at position 101 of nucleotide sequence(s) selected from the group consisting of SEQ ID NO: 1 to SEQ ID NO: 918 in the DNA isolated from at least two Korean individuals whose kinship is to be identified, after the identifying the SNP, comprises making pairwise comparison of each SNP nucleotide in each sample, and the making pairwise comparison of each SNP nucleotide in each sample comprises as follow:
[0147] (a) i) when all nucleotides of the SNP identified from two alleles in two samples being pairwise compared are identical, assigning an IBS score of 2 to the SNP, ii) if only one nucleotide of the SNP is identical between two alleles in two samples being pairwise compared, assigning an IBS score of 1 to the SNP, or iii) if all nucleotides of the SNP identified from two alleles in two samples being pairwise compared are different, assigning an IBS score of 0 to the SNP; and
[0148] (b) obtaining an average value of IBS scores of all the SNPs compared pairwise; wherein when the average IBS score obtained from the (b) obtaining an average value is 0.310 to 0.700, providing information that there is a possibility that the two individuals from which the two samples pairwise compared were isolated are in any one of parent, child, brother, sister, and sibling relationships; or
[0149] wherein when the average IBS score obtained from the (b) obtaining an average value is less than 0.310, providing information that there is a possibility that the two individuals from which the two samples pairwise compared were isolated are not in any of parent, child, brother, sister, and sibling relationships.

[0150] In another specific embodiment of the present invention, when the average IBS score is from 0.340 to 0.700, there is provided information that there is a possibility that the two individuals from which the two samples pairwise compared were isolated are in any one of parent, child, brother, sister, and sibling relationships; or
[0151] when the average IBS score is less than 0.340, there is provided information that there is a possibility that the two individuals from which the two samples pairwise compared were isolated are not in any of parent, child, brother, sister, and sibling relationships.

[0152] In another embodiment of the present invention, the method of kinship identification in Korean comprising the following:
[0153] 1) isolating DNA from at least two Korean individuals whose kinship is to be identified;
[0154] 2) identifying an SNP located at position 101 of nucleotide sequences set forth as SEQ ID NO: 919 to SEQ ID NO: 1400 in the DNA;
[0155] 3) inputting data regarding nucleotide types of the SNP to a computer-readable medium having input of information of the SNP located at position 101 in the nucleotide sequences set forth as SEQ ID NO: 1 to SEQ ID NO: 918;
[0156] 4) calculating an average IBS score between two Korean individuals by using the computer-readable medium; and
[0157] 5) providing information that there is possibility that the two Korean individuals are in any one of parent, child, brother, sister, and sibling relationships if the average IBS score is between 0.310 and 0.700, or providing information that there is possibility that the two Korean individuals are not in any of parent, child, brother, sister, and sibling relationships if the average IBS score is less than 0.310.

[0158] The method of kinship identification in Korean according to the present invention will be described step-by-step.

The Step of Isolating Nucleic Acids from a Sample Isolated from a Subject

[0159] The method of kinship identification in Korean may further comprise a step of isolating nucleic acids from a sample isolated from a subject. As a method of isolating nucleic acids from a sample, any method well-known in the art, examples being but not necessarily limited to: an extraction method using acid guanidinium thiocyanate-phenol-chloroform, a method using PCI (phenol-chloroform-isoamyl alcohol) solution, and the like, and specific details of such methods are disclosed in Molecular Cloning, A Laboratory Manual, Cold Spring Harbor Laboratory Press, Cold Spring Harbor, N.Y. (2001) and Haymes, B. D., et al., Nucleic Acid Hybridization, A Practical Approach, IRL Press, Washington, D.C. (1985). In order to isolate nucleic acids from a sample isolated from a subject, a commercially available nucleic acid extraction kit, nucleic acid purification kit, and the like, may be used. The nucleic acids may be made to additionally or repeatedly undergo a purification or quality control process.

[0160] In particular, from the sample isolated from the subject, genomic DNA is extracted, purified, and subjected to quality control (QC). Commercially available spectrometers or fluorometers, such as NanoDrop and Qubit by Thermo Scientific, may be used to check for DNA quality such as confirming whether the extracted DNA molecules are double-stranded DNA and at a concentration appropriate for later sequencing, and checking DNA purity by investigating A260/280 ratio and A260/230 ratio, checking DNA degradation through electrophoresis, and the like. DNA having passed QC standards appropriate for sequencing are used to construct libraries at a later stage. Any and all methods of DNA extraction, purification, and QC known in the art may be used in the present invention without limitations.

Step of Identifying the Nucleotide of SNP Located at 101 Base Position in at Least One Sequence Selected from the Group Consisting of Nucleotide Sequences Set Forth in SEQ ID NO: 1 to SEQ ID NO: 918; SEQ ID NO: 919 to SEQ ID NO: 1400; or SEQ ID NO: 1 to SEQ ID NO: 1400

[0161] The step of identifying the SNP may utilize without limitations, any DNA amplification method, DNA detection method, or sequencing method known in the art. Among the sequencing methods, it is preferable to use the next-generation sequencing (NGS) method.

[0162] Hereinbelow, the sequencing method for identification of the SNP will be described step-by-step.

### (1) DNA Fragmentation

[0163] DNA having passed the above-described QC standards are subject to fragmentation. DNA fragmentation may be performed by physical methods or chemical methods using enzymes known in the art. Mechanical methods involving breakage of phosphodiester linkages of DNA molecules by applying shear force include acoustic shearing, sonication, nebulization, hydrodynamic shearing, and the like. Also, commercially available Adaptive Focused Acoustic® technology provided by Covaris, Bioruptor® DNA shearing technology provided by Diagenode, HydroShear Plus Hydrodynamic DNA shearing instrument provided by DigiLab, and the like may also be utilized without necessarily being limited thereto.

[0164] DNA fragmentation using enzymatic cleavage includes methods of generating a double strand break by creating a nick in each strand or cutting two strands of DNA with endonuclease and nicking enzymes, and the like. DNA size can be adjusted by adjusting enzymatic digestion time.

[0165] In addition to the above-described methods of DNA fragmentation using physical shearing and enzymatic digestion, DNA fragmentation methods using transposon may also be utilized (Adey A. et al., Genome Biol. 2010; 11(12):R119).

[0166] After DNA fragmentation, DNA having a size of 300 bp to 500 bp are selected by electrophoresis. After DNA fragmentation, QC may be additionally conducted.

### (2) End Repair and A-Tailing

[0167] Damaged ends of the fragmented DNAs obtained above, that is, 5′ overhangs and 3′ overhangs, are repaired into blunt ends by using T4 DNA polymerase, Klenow fragment, or the like. Next, the blunt ends are phosphorylated at 5′ ends by T4 polynucleotide kinase, and adenylated, that is, A-tailed at 3′ ends by Klenow fragment or Taq DNA polymerase. A-tailing is necessary for later linking an adaptor to DNA.

### (3) Adaptor Ligation

[0168] Adaptors are ligated to both ends of the DNA fragments obtained above to allow oligonucleotides on a flow cell to be able to recognize the adaptors for sequencing at a later stage. The adaptor is a pair of oligonucleotides to which primers anneal for DNA amplification at a later stage. To remove adaptors unincorporated in DNA fragments and adaptor dimers, an additional clean-up process may be performed.

### (4) Construction of Libraries and Amplification

[0169] In order to construct libraries of good quality and high yield, DNA should be amplified using from the smallest possible amount to a large amount of DNA, and the libraries prepared should be able to produce high yield even when using a small amount of DNA. Since PCR errors later give rise to errors in sequencing, it is preferable to run a smaller number of PCR cycles, and in order to perform PCR with high uniformity regardless of GC content and AT content in sequence, polymerases with high activity and fidelity should be used. Library amplification may be performed using an index primer that binds to an adapter, and the index primer may be single or dual.

[0170] To generate libraries of the DNA ligated with adaptors above, library amplification may be performed with or without the use of PCR. DNA library amplification not involving the use of PCR is often used to generate libraries with higher GC content and AT content, and since this requires a large quantity of DNA, generating libraries from degraded nucleic acids or a small amount of sample, amplification is performed with the use of PCR. Common PCR can introduce GC bias, which hinders de novo sequencing and SNP discovery.

[0171] Therefore, the present inventors used a DNA amplification method based on RCA (rolling circular amplicon) in order to reduce such PCR errors. However, any DNA amplification method with low amplification error rate known in the art may be used without limitations.

[0172] In particular, RCA is a process of unidirectional nucleic acid replication that can rapidly synthesize circular molecules of DNA or RNA, wherein the replication is initiated a nicked strand of the double-stranded circular DNA molecule. Using the unnicked strand as a template and separating the nicked single-stranded DNA as a result of replication, continued DNA synthesis can produce a long linear single-stranded continuous DNA concatemer.

[0173] For RCA-based PCR, the linear double-stranded DNA ligated with adaptors prepared above may be additionally amplified by PCR. After PCR amplification, additional QC may be run.

[0174] In one example of the present invention, the above-described RCA-based DNBSEQ-T7, which is a DNA nano ball (DNB) sequencing set provided by MGI, was used, but those skilled in the art would appreciate that the method is not necessarily limited thereto, and any commercially available sequencing platform may be used, examples being Illumine®, Nova-Seq, Thermo Fisher Scientific Ion Torrent™, Helicos Biosciences tSMS (true Single Molecule Sequencing), PacBio SMRT™ (Single-molecule real time), GridION™, and MinION™.

[0175] The PCR products obtained above, which are linear double-stranded DNA molecules, are heat-denatured into linear single-stranded DNA molecules and then connected by DNA ligase to form circular single-stranded DNA molecules. QC may be additionally run on the circular single-stranded DNA molecules. After adding primers for DNA nano balls (DNB) to the circular single-stranded DNA molecules obtained following the manufacturer's instructions, RCA reaction was performed. The obtained DNB was pooled and DNB sequencing was performed using high density patterned nanoarray flow cells by MGI Tech, which allow only one DNB bound per active site.

### (4) Sequencing

[0176] Sequencing (genome decoding) may be performed by methods known in the art and may be performed through main steps as shown in the WGS (whole genome sequencing) analysis pipeline diagram illustrated in FIG. 9.

### 1) Sequence Generation

[0177] As a result of sequencing, a nucleotide sequence is identified from a DNA fragment and generated in a read unit. For each read, a Phred quality score, which is a per-base quality index, is generated together, and this is stored in a FastQ file with the nucleotide sequence information.

[0178] As used herein, the term “Phred quality score” refers to a quality index indicating the reliability of each base, and is a value representing the estimated probability of error per base. Phred quality scores are used as a metric to determine how accurately each sequence is read from sequencing data. The higher the score, the more likely that the base calling is accurate.

[0179] Phred quality scores (Q) can be calculated by Equation 1 below.

$${}^{*} 193 \qquad [ Equation 1 ]$$

$$Q = - 10 log ( error probability )$$

[0180] For example, if the probability of error per base is 1/1000 and 1/10000, the Phred quality scores (Q) are Q30 and Q40, respectively.

[0181] The term “read” as used herein refers to information of base pairs of analysis amount generated from a DNA or cDNA fragment included in a sequencing library. The read includes data, sequence, or base sequence fragment output as a result of sequencing.

[0182] The term “FastQ file” as used herein refers to a file containing identification number and sequence of each read, and quality index corresponding for each read.

[0183] Next, the quality of FastQ file is evaluated. Programs capable of evaluating the quality of FastQ files include FastQC, PRINSEQ, Trimmomatic and the like.

[0184] In one example of the present invention, FastQC program was used to check per-base quality and check for any defect or issue. In addition, using Cutadapt program (DOI:10.14806/ej.17.1.200), adaptor sequences were removed from the sequencing reads, and using FastP, FastQ data was preprocessed to filter quality. Before proceeding to the sequence alignment process, per-base quality can be further checked using FastQC program.

### 2) Sequence Alignment

[0185] The sequence of generated reads and the sequence of a human reference genome are aligned. For the human reference genome, GRCh 38 or GRCh 37 may be used, and this is disclosed in public database (GRCh 38, USCS version Hg19, https://hgdownload.cse.ucsc.edu/goldenPath/hg19/bigZips/; and GRCh 37, USCS version Hg38, https://hgdownload.cse.ucsc.edu/goldenPath/hg38/bigZips/). Through sequence alignment, the original position of a corresponding DNA fragment in the genome can be estimated. Using BWA-MEM program (Heng Li, 2013), the reads are aligned based on the similarity with the reference genome. The results are stored as BAM file.

### 3) Removal of Duplicate Sequences

[0186] After sequence alignment, sequence reads determined as PCR duplicates are marked by tags using Picard program. The results are stored as BAM file.

### 4) Base Quality Score Recalibration (BQSR)

[0187] Using GATK4 program, error patterns in each base quality score calculated by the sequencing device were detected and corrected using machine learning techniques. The results are stored as BAM file.

### 5) Quality Evaluation

[0188] After sequence alignment, quality evaluation of the BAM files is performed to indirectly determine authenticity of individuals being sequenced and any defect in sampling and library construction. Quality evaluation includes depth of coverage, mean depth of coverage, duplication rate, and the like. Depth of coverage refers to the number of reads mapped at a target point. Duplication rate refers to the percentage of PCR duplicate reads, which are copies of the same DNA fragment that occur in the PCR process during sequencing.

### 6) Variant Calling

[0189] Variants were called by detecting variations between the reference genome and a generated sequence. When BAM files are input to GTK4 program, detected variations are stored in VCF file format. The term “VCF (variant cell format) file” as used herein refers to a standardized file format used for representing variations determined as differing from the reference genome and their frequencies.

[0190] A VCF file contains information such as the chromosome on which the variation is located, the position of the variation on the chromosome, the unique identification number of the variation such as dbSNP rs number, the base (REF) that appears at the variation position in the reference genome, alternative alleles (ALT) (that is, variants), a quality score, a filter name indicated in the variation, additional information about the variation, the format of a sample genotype, and the like.

### (5) Extraction of Kinship Coefficient or Coefficient or Relatedness

[0191] The present inventors calculated an average IBS score between two individuals from variations of 918 and/or 482 SNP markers from a BAM file previously extracted using Somalier program (Pedersen et al. 2020).

[0192] In an embodiment of the present invention, as a result of deriving an average IBS score between two individuals from variations of the 918 SNP markers, if the average IBS score between two individuals whose kinship is to be identified is located in a buffer region of 0.300 to 0.700, information that these two individuals in a first-degree relationship with each other is provided, or if the IBS value between two individuals is less than 0.300, information that these two individuals are not in a first-degree relationship with each other is provided.

[0193] In another embodiment of the present invention, as a result of deriving an average IBS score between two individuals from variations of the 918 SNP markers, if the average IBS score between two individuals whose kinship is to be identified is located in a buffer region of 0.380 to 0.700, information that these two individuals are in a first-degree relationship with each other is provided, or if the IBS value between two individuals is less than 0.380, information that these two individuals are not in a first-degree relationship with each other is provided.

[0194] In yet another embodiment of the present invention, as a result of deriving an average IBS score between two individuals from variations of the 918 SNP markers, if the average IBS score between two individuals whose kinship is to be identified is located in a buffer region of 0.382 to 0.574, information that these two individuals are in a first-degree relationship with each other is provided; if the average IBS score between two individuals is in a buffer region of 0.166 to 0.299, information that these two individuals are in a second-degree relationship with each other is provided; and if the average IBS score between two individuals is in a buffer region of −0.193 to 0.144, information that these two individuals are unrelated or not in any familial relationship is provided.

[0195] In yet another embodiment of the present invention, as a result of deriving an average IBS score between two individuals from variations of the 918 SNP markers, if the average IBS score between two individuals whose kinship is to be identified is located in a buffer region of 0.413 to 0.635, information that these two individuals are first-degree relatives to each other is provided; if the average IBS score between two individuals is in a buffer region of 0.087 to 0.378, information that these two individuals are second-degree relatives to each other is provided; and if the average IBS score between two individuals is in a region of 0.273 or less (including negative IBS values), information that these two individuals are unrelated or not in any familial relationship is provided.

[0196] When using the 918 SNP markers according to the present invention, even when a smaller number of SNPs is checked compared to the prior art methods, and even when no parent information is available, since the buffer regions in which the average IBS score of two individuals in a first-degree relationship is located and the buffer region in which the average IBS score of two individuals in a second-degree relationship is located are clearly separated from each other, that is, the two buffer regions do not overlap but are distinguished from each other, it is possible to clearly distinguish, with respect to a subject, individuals who are in a first-d-r relationship as one of parent, child, brother, sister, and sibling, from individuals who are not in any first-d-r relationship.

[0197] It is considered that the use of the 482 SNP markers as shown in SEQ ID NO: 919 to SEQ ID NO: 1400 in addition to the above-described 918 SNP markers as shown in SEQ ID NO: 1 to SEQ ID NO: 918 would increase the accuracy of kinship identification analysis.

[0198] In an embodiment of the present invention, as a result of deriving an average IBS score between two individuals from variations of the 482 SNP markers, if the average IBS score between two individuals whose kinship is to be identified is located in a buffer region of 0.310 to 0.700, information that there is possibility of these two individuals being in a first-d-r relationship is provided, and if the average IBS score between two individuals is less than 0.310, information that there is possibility of these two individuals not being in a first-d-r relationship is provided.

[0199] In another embodiment of the present invention, as a result of deriving an average IBS score between two individuals from variations of the 482 SNP markers, if the average IBS score between two individuals whose kinship is to be identified is located in a buffer region of 0.340 to 0.700, information that there is possibility of these two individuals being in a first-d-r relationship is provided, and if the average IBS score between two individuals is less than 0.340, information that there is possibility of these two individuals not being in a first-d-r relationship is provided.

[0200] In yet another embodiment of the present invention, as a result of deriving an average IBS score between two individuals from variations of the 482 SNP markers, if the average IBS score between two individuals whose kinship is to be identified is located in a buffer region of 0.340 to 0.620, information that there is possibility of these two individuals being in a first-d-r relationship with each other is provided; if the average IBS score between two individuals is in a buffer region of 0.175 to 0.309, information that there is possibility of these two individuals being in a second-d-r relationship with each other is provided; and if the average IBS score between two individuals is in a buffer region of −0.277 to 0.175, information that there is possibility of these two individuals being unrelated or not in any familial relationship is provided.

[0201] In yet another embodiment of the present invention, as a result of deriving an average IBS score between two individuals from variations of the 482 SNP markers, if the average IBS score between two individuals whose kinship is to be identified is located in a buffer region of 0.378 to 0.667, information that there is possibility of these two individuals being in a first-d-r relationship with each other is provided; if the average IBS score between two individuals is in a buffer region of 0.087 to 0.414, information that there is possibility of these two individuals being in a second-d-r relationship with each other is provided; and if the average IBS score between two individuals is in a region of 0.270 or less (including negative IBS values), information that there is possibility of these two individuals being unrelated or not in any familial relationship is provided.

[0202] When using the 482 SNP markers according to the present invention, the buffer region in which an average IBS score of two individuals in a first-d-r relationship is located partially overlaps with the buffer region in which an average IBS score of two individuals in a second-d-r relationship is located. Therefore, the use of the 482 SNP markers may be slightly limited in distinguishing individuals in first-d-r relationships with a subject, from individuals who are in second-d-r relationships with the subject, but can be useful in distinguishing individuals who are in first-d-r relationships with the subject from those who are not in any first-d-r relationships. In the field of forensic science, any evidence indicating that the possibility of two individuals being in a familial relationship cannot be excluded holds significance. Since the 482 SNP markers according to the present invention makes it possible to distinguish individuals in a first-d-r relationship from the unrelated, individuals possibly in a first-d-r relationship from the unrelated, or individuals highly likely in a first-d-r relationship from the unrelated by simple pairwise comparison of only 482 minimum number of SNPs, it is cost-effective and can reduce the time required for kinship identification, and accordingly, the 482 SNP markers according to the present invention are useful in the field of forensic science, legal medicine, or criminal investigation.

[0203] It is considered that use of the 918 SNP markers as shown in SEQ ID NO: 1 to SEQ ID NO: 918 in addition to the above-described 482 SNP markers as shown in SEQ ID NO: 919 to SEQ ID NO: 1400 would increase the accuracy of kinship identification analysis.

[0204] Since the method of kinship identification in Korean is enabled by using the above-described preparation for amplifying or detecting at least one of SNPs located at position 101 in nucleotide sequences set forth in SEQ ID NO: 1 to SEQ ID NO: 918 and/or SEQ ID NO: 919 to SEQ ID NO: 1400 according to another aspect of the present invention, any descriptions deemed redundant will be omitted in the interest of clarity of this application.

[0205] According to yet another aspect of the present invention, the present invention provides a method of discovering an SNP marker for kinship identification, the method comprising extracting, from the human genome database, SNPs characterized by at least one of the following features:
[0206] SNPs having a p value of 0.05 or more at Hardy-Weinberg equilibrium (HWE);
[0207] SNPs that is not present within a genomic region or within 100 kbp upstream or downstream of the genomic regions;
[0208] SNPs having a variant allele frequency of 0.3 to 0.7;
[0209] SNPs not present in linkage disequilibrium (LD); and
[0210] SNPs not present in repeated regions.

[0211] In an embodiment of the present invention, the SNP has a variant allele frequency of 0.4 to 0.6.

[0212] In an embodiment of the present invention, the human genome database may be a reference genome. In a specific embodiment of the present invention, the reference genome is a standard sequence that is completely sequenced and established in public database. The reference genome may be GRCh37/hg19 or GRCh38/hg38.

[0213] In another embodiment of the present invention, the human genome database is dbSNP (Single Nucleotide Polymorphism database) which is open database provided by NCBI (National Center for Biotechnology Information).

[0214] In another embodiment of the present invention, the human genome database may be a Korean reference genome. The Korean reference genome is a variome obtained from the whole genome sequence (WGS) of 397 Korean individuals (Y J et al., 2015), the WGS of 200 Korean individuals (Lee et al., 2017, sequencing studies in cardiovascular diseases) or from KoVariome, which is Korea National Standard Reference Variome database.

[0215] Those skilled in the art would appreciate that SNP panels for kinship identification specific to each population can be discovered by referring to the method of discovering SNP markers for kinship identification according to the present invention.

[0216] According to yet another embodiment of the present invention, the human genome database may be a reference genome of a specific population, including but not limited to, Europeans, Africans, African Americans, Asians, East Asians, other Asians, Latin Americans, and South Asians.

[0217] For example, the human genome database may be ALFA (Allele Frequency Aggregator), Japanese reference genome 8.3KJPN, global reference genome (1000G, 1000 Genomes Project), Estonian reference genome, reference genome of a birth cohort in the Bristol area of the UK (ALSPAC, the Avon Longitudinal Study of Parents and Children), British twin reference genome TwinsUK, Korean reference genome KOREAN, HGDP Stanford (The Human Genome Diversity Project), HapMap project, GoNL (Genome of the Netherlands), Swedish reference genome NorthernSweden, SGDP PRJ (Simons Genome Diversity Project), QGP (Qatar Genome Program), Vietnamese reference genome, Ancient Sardinia reference genome, Danish reference genome (GENOME DK), or Siberian reference genome, but is not necessarily limited thereto.

[0218] In an embodiment of the present invention, the Hardy-Weinberg equilibrium (HWE) is a dataset extracted from genome-wide association studies (GWAS) deposited in the NCBI dbGaP (database of Genotypes and Phenotypes).

[0219] In an embodiment of the present invention, the allele frequency may be a Korean allele frequency. In one specific example of the present invention, the Korean allele frequency is extracted from the KoVariome database.

[0220] In an embodiment of the present invention, the genomic regions is an exon or coding sequence.

[0221] In an embodiment of the present invention, the SNPs not in linkage disequilibrium are extracted from HaploReg v 4.1 database. In one specific embodiment of the present invention, the SNPs not in linkage disequilibrium are SNPs having an r² value of less than 0.2, extracted from the HaploReg v 4.1 database.

[0222] In an embodiment of the present invention, the repeated region is a region disclosed in www.repeatmasker.org/species/hg.html.

[0223] Since the composition for kinship identification in Korean according to another aspect of the present invention is derived as a result of the above-described method of discovering SNP markers for kinship identification, any description that may be redundant will be omitted for clarity of this specification.

### Advantageous Effects

[0224] Characteristics and advantages of the present invention are summarized as follows:
[0225] (a) the present invention provides a composition for kinship identification in Korean, comprising an agent for amplifying or detecting a single nucleotide polymorphism (SNP) located at position 101 in at least one sequence selected from the group consisting of nucleotide sequences set forth in SEQ ID NO: 1 to SEQ ID NO: 918, SEQ ID NO: 919 to SEQ ID NO: 1400, or SEQ ID NO: 1 to SEQ ID NO: 1400;
[0226] (b) the present invention provides a kit for kinship identification in Korean, comprising the above-described composition for kinship identification in Korean;
[0227] (c) the present invention provides a method of kinship identification in Korean;
[0228] (d) the present invention provides a method of discovering an SNP marker for kinship identification; and
[0229] (e) the use of the composition for kinship identification in Korean of the present invention allows first-degree relatives to be clearly distinguished from those who are not first-degree relatives in a Korean population by using the minimum number of forensic SNP markers even when no DNA of immediate family member is available.

### DESCRIPTION OF DRAWINGS

[0230] FIG. 1 shows a flowchart for discovering 918 SNP markers for kinship identification.

[0231] FIG. 2 shows a flowchart for discovering 482 SNP markers for kinship identification.

[0232] FIG. 3 shows a schematic diagram of chromosomes with the positions of 918 and 482 SNP markers according to the present invention.

[0233] FIG. 4 shows a diagram of a WGS analysis pipeline.

[0234] FIG. 5 shows a comparison matrix of coefficients of relatedness as a result of IBS testing of 40 individuals using 918 SNP markers.

[0235] FIG. 6 shows a per-group comparison graph of coefficients of relatedness as a result of IBS testing of 40 individuals using 918 SNP markers.

[0236] FIG. 7 shows a comparison matrix of coefficients of relatedness as a result of IBS testing of 50 individuals using 918 SNP markers.

[0237] FIG. 8 shows a per-group comparison graph of coefficients of relatedness as a result of IBS testing of 50 individuals using 918 SNP markers.

[0238] FIG. 9 shows a comparison matrix of coefficients of relatedness as a result of IBS testing of 40 individuals using 482 SNP markers.

[0239] FIG. 10 shows a per-group comparison graph of coefficients of relatedness as a result of IBS testing of 40 individuals using 482 SNP markers.

[0240] FIG. 11 shows a comparison matrix of coefficients of relatedness as a result of IBS testing of 50 individuals using 482 SNP markers.

[0241] FIG. 12 shows a per-group comparison graph of relatedness as a result of IBS testing of 50 individuals using 482 SNP markers.

### MODE FOR INVENTION

[0242] Hereinbelow, the present invention will be described in greater detail in conjunction with examples. The following examples are provided to describe the present invention in further details, and it will become apparent to those skilled in the art that the scope of the present invention as suggested in the appended claims is not limited by the following examples.

### EXAMPLES

[0243] Throughout this specification, the sign “%” used to express the concentration of a substance, unless otherwise specified, refers to (weight/weight) % for solid/solid, (weight/volume) % for solid/liquid, and (volume/volume) % for liquid/liquid.

### Example 1. Outline of the Kinship Identification Method of the Present Invention

[0244] Currently, kinship testing based on markers such as forensic STRs is widely used. Although about 10⁵ to 10⁶ SNPs can be used to estimate relatedness of higher degrees, genome-wide genotyping and SNP analysis may be impractical for forensic use. Therefore, to provide it is worthwhile to explore SNP markers capable of estimating relatedness in a small quantity. In the present invention, for accurate analysis of kinship, SNP markers capable of estimating relatedness based on WGS were extracted and analyzed.

[0245] In order to discover the minimum number of SNPs required for genetic association identification to later create SNP panels required for kinship identification, 918 SNP markers and 482 SNP markers for kinship identification in a Korean population were discovered from about 84 million SNPs of 88 unrelated Korean individuals disclosed in Korean National Standard Reference Variome (KoVariome) database.

[0246] In order to identify kinship in Korean by using the 918 SNP markers and the 482 SNP markers discovered, the present inventors collected oral swaps or saliva from a Korean population of 90 individuals who are in first-degree, second-degree, and third-degree relationships. From the samples, DNAs were extracted and sequenced. Using a sequencing device, Nova-Seq (Illumina), whole genome sequencing (WGS) data of 40 individuals were produced. By providing WGS data of 40 individuals generated by Nova-Seq and samples of 50 individuals to Clinomics Inc., WGS data of 48 individuals using DNBSEQ-T7 (MGI) and WGS data of 2 individuals using Nova-Seq were obtained.

[0247] From the above described i) WGS data of 40 individuals produced from Nova-Seq, and ii) WGS data of 48 individuals produced from DNBSEQ-T7 and WGS data of 2 individuals produced from Nova-Seq, average IBS (identity by state) scores were derived through pairwise comparison between two individuals, and then divided into first degree relatives, second degree relatives, third degree relatives, and the unrelated (no kinship or unrelated) groups, and then compared for average IBS values to thereby perform an estimation analysis of kinship in Korean using the SNP markers of the present invention.

### Example 2. Method of Discovering SNP Markers for Kinship Identification in Korean

[0248] As described above, the present inventors have discovered SNP markers for kinship identification in Korean, from about 84 million SNPs of 88 unrelated Korean individuals, that is, individuals who are not in any kinship relationship, disclosed in Korean National Standard Reference Variome (KoVariome) database (Kim J et al. Sci Rep. 2018).

### 2-1: Discovery of 918 SNP Markers

[0249] The process of selecting candidate SNP markers for kinship identification was performed in the sequence shown in the schematic diagram of FIG. 1.

### 2-1-1: Select Loci at Hardy-Weinberg Equilibrium

[0250] First, the Hardy-Weinberg equilibrium (HWE) of SNPs was extracted from genome-wide association studies (GWAS) deposited in the NCBI (National Center for Biotechnology Information) dbGaP (database of Genotype and Phenotypes). SNPs having p value of 0.05 or more at HWE test in at least one dataset were extracted. As a result, 1,856,032 SNPs were extracted.

2-1-2: Exclude SNPs within or Near Genomic Regions

[0251] SNPs at or within 100 kbp up- or downstream of genomic regions were excluded to avoid potential influence of selection pressure on SNP population frequencies. In genetic research on diseases, since phenotypes are important, exon research should be conducted. However, in forensic criminal investigations, investigations in genetic characteristics, particularly in case of genes coding for certain proteins, may lead to violation of human rights and thus are excluded from investigation or analysis applications. As a result, 72,701 SNPs were extracted.

### 2-1-3: Exclude SNP Loci Using Heterozygosity of Kovariome

[0252] In addition, SNPs located near the population allele frequency of around 0.5 (0.3 to 0.7) in Kovariome, which is Korea National Standard Reference Variome database described above, were extracted. A balanced allele frequency maximizes the probability that SNPs in any 2 unrelated samples will differ. As a result, 22,176 SNPs were extracted.

### 2-1-4: Exclude SNP Loci in Linkage Disequilibrium

[0253] To exclude SNPs in linkage disequilibrium (LD), SNPs with r² of 0.2 or more were excluded from SNPs extracted using HaploReg v 4.1 database (see Ward & Kellis, 2016). The candidate SNPs were selected based on the leftmost among SNPs with r² of 0.2 or more. As a result, 1,516 SNPs were extracted.

### 2-1-5: Exclude SNP Loci in Repeated Regions

[0254] Finally, SNPs in the known repeated regions were removed. The SNPs in the repeated regions were downloaded from www.repeatmasker.org/species/hg.html (hg38—December 2013—RepeatMasker open—4.0.5—Repeat Library 20140131). Finally, a panel of 918 SNPs was discovered.

[0255] The 918 SNPs selected for kinship identification in Korean are shown in Table 1 below, and sequences each consisting of 201 nucleotides including each SNP at position 101 are shown in SEQ ID NO: 1 to SEQ ID NO: 918. The position of an SNP on the chromosome is represented based on human reference genome GRCh38 (Genome Reference Consortium Human Build 38; hg38), and each SNP may have a reference allele (ref. allele) or an alternative allele (alt. allele) positioned at position 101 [n]. In addition, reference SNP cluster ID numbers (rs #) of dbSNP (Single Nucleotide Polymorphism database), which is an open database provided by NCBI (National Center for Biotechnology Information) were cited together.

TABLE 1

| SEQ ID | Chromosome | Position | Ref. | Alt. | |
|---|---|---|---|---|---|
| NO: | # | (GRCh38) | Allele | Allele | dbSNP rs# |
| 1 | 1 | 4281783 | C | T | rs1390136 |
| 2 | 1 | 4307966 | A | G | rs1817913 |
| 3 | 1 | 4308891 | C | T | rs351617 |
| 4 | 1 | 5193376 | G | A | rs12041491 |
| 5 | 1 | 29598423 | T | C | rs915409 |
| 6 | 1 | 30525732 | A | G | rs10915147 |
| 7 | 1 | 34379235 | G | A | rs705197 |
| 8 | 1 | 34478162 | G | A | rs10914958 |
| 9 | 1 | 60258050 | A | C | rs1156177 |
| 10 | 1 | 60410474 | T | C | rs7529292 |
| 11 | 1 | 79651949 | A | G | rs4650425 |
| 12 | 1 | 79767596 | C | T | rs3927739 |
| 13 | 1 | 79771567 | T | G | rs12119501 |
| 14 | 1 | 79783314 | A | C | rs12030273 |
| 15 | 1 | 80890585 | A | G | rs12145866 |
| 16 | 1 | 82095875 | T | G | rs962249 |
| 17 | 1 | 82100386 | A | T | rs11163422 |
| 18 | 1 | 83274975 | C | T | rs2538251 |
| 19 | 1 | 83277034 | C | G | rs17101590 |
| 20 | 1 | 83288496 | A | G | rs12120283 |
| 21 | 1 | 91128933 | T | A | rs240510 |
| 22 | 1 | 91139976 | G | A | rs653759 |
| 23 | 1 | 91152839 | A | G | rs347026 |
| 24 | 1 | 96123116 | T | G | rs2154010 |
| 25 | 1 | 96931655 | C | T | rs17115963 |
| 26 | 1 | 98376273 | T | C | rs7525553 |
| 27 | 1 | 98462715 | A | G | rs4950129 |
| 28 | 1 | 104328360 | T | G | rs11809638 |
| 29 | 1 | 104444439 | G | A | rs7520815 |
| 30 | 1 | 104651212 | A | T | rs11184241 |
| 31 | 1 | 106257917 | C | T | rs4301658 |
| 32 | 1 | 118365750 | G | T | rs17038218 |
| 33 | 1 | 165081809 | A | G | rs1494413 |
| 34 | 1 | 187896223 | C | T | rs10912208 |
| 35 | 1 | 187903620 | T | G | rs11591211 |
| 36 | 1 | 188351784 | A | T | rs4282763 |
| 37 | 1 | 188393167 | A | G | rs12039277 |
| 38 | 1 | 189253831 | C | T | rs6700979 |
| 39 | 1 | 191333287 | A | G | rs1246707 |
| 40 | 1 | 195186500 | A | T | rs681013 |
| 41 | 1 | 195189835 | A | T | rs4111374 |
| 42 | 1 | 195600484 | C | T | rs10494727 |
| 43 | 1 | 195863867 | A | G | rs7542834 |
| 44 | 1 | 195885507 | G | A | rs921516 |
| 45 | 1 | 199544437 | G | A | rs12045830 |
| 46 | 1 | 199613744 | C | A | rs9628679 |
| 47 | 1 | 208378428 | G | A | rs11119057 |
| 48 | 1 | 208463524 | T | C | rs993324 |
| 49 | 1 | 208855095 | T | C | rs12043779 |
| 50 | 1 | 220997968 | G | A | rs2484696 |
| 51 | 10 | 1847907 | C | A | rs17157139 |
| 52 | 10 | 9140785 | G | A | rs12243321 |
| 53 | 10 | 9417332 | T | C | rs12783041 |
| 54 | 10 | 9559927 | T | A | rs7920503 |
| 55 | 10 | 10563087 | C | T | rs2147291 |
| 56 | 10 | 10596873 | C | T | rs972186 |
| 57 | 10 | 10602864 | A | G | rs7089232 |
| 58 | 10 | 10610702 | G | A | rs4749972 |
| 59 | 10 | 29041960 | C | G | rs1335701 |
| 60 | 10 | 29081550 | T | A | rs9664566 |
| 61 | 10 | 29160200 | A | C | rs511991 |
| 62 | 10 | 53190596 | A | G | rs2384170 |
| 63 | 10 | 55847166 | A | G | rs1338788 |
| 64 | 10 | 56745375 | A | G | rs7924028 |
| 65 | 10 | 56867670 | A | G | rs11005565 |
| 66 | 10 | 57408260 | A | G | rs11005792 |
| 67 | 10 | 81367131 | C | A | rs649207 |
| 68 | 10 | 81404894 | C | A | rs7073999 |
| 69 | 10 | 81406583 | A | G | rs2183174 |
| 70 | 10 | 81545981 | A | G | rs17638653 |
| 71 | 10 | 83169451 | G | T | rs11197616 |
| 72 | 10 | 83560360 | C | T | rs11199196 |
| 73 | 10 | 84662987 | A | G | rs11599612 |
| 74 | 10 | 84705330 | C | G | rs2505778 |
| 75 | 10 | 84828122 | G | A | rs7901050 |
| 76 | 10 | 105411136 | G | A | rs12356045 |
| 77 | 10 | 106306479 | T | A | rs821676 |
| 78 | 10 | 120209055 | G | C | rs914483 |
| 79 | 10 | 120248718 | C | T | rs12243526 |
| 80 | 10 | 121292896 | A | C | rs12220387 |
| 81 | 10 | 124231226 | G | A | rs28564851 |
| 82 | 10 | 128420777 | C | T | rs1416722 |
| 83 | 10 | 128487399 | C | T | rs1984218 |
| 84 | 10 | 128520194 | C | T | rs11016297 |
| 85 | 10 | 128523624 | C | T | rs11016304 |
| 86 | 10 | 128549487 | G | C | rs10741157 |
| 87 | 10 | 128549508 | T | C | rs4750710 |
| 88 | 10 | 128554967 | A | G | rs7898393 |
| 89 | 10 | 128685050 | A | G | rs12253697 |
| 90 | 10 | 128712175 | A | G | rs7893266 |
| 91 | 10 | 128745696 | A | G | rs7910094 |
| 92 | 10 | 128749437 | C | G | rs11016458 |
| 93 | 10 | 128779321 | C | T | rs10829492 |
| 94 | 10 | 129123978 | A | G | rs10741181 |
| 95 | 10 | 129133073 | C | T | rs2123420 |
| 96 | 10 | 129135480 | T | C | rs914570 |
| 97 | 10 | 129149574 | A | G | rs10128422 |
| 98 | 10 | 130792707 | A | G | rs7917491 |
| 99 | 10 | 130804395 | C | T | rs12570660 |
| 100 | 10 | 131519607 | G | A | rs10765078 |
| 101 | 10 | 131562136 | T | C | rs10765092 |
| 102 | 10 | 131660805 | A | C | rs4545466 |
| 103 | 11 | 15354206 | C | T | rs11023541 |
| 104 | 11 | 15354744 | C | G | rs7122143 |
| 105 | 11 | 24088370 | G | A | rs1317014 |
| 106 | 11 | 24111009 | T | C | rs7121343 |
| 107 | 11 | 36852864 | C | G | rs10501163 |
| 108 | 11 | 37095265 | G | A | rs746517 |
| 109 | 11 | 37124101 | T | C | rs2704917 |
| 110 | 11 | 37228417 | G | A | rs4756376 |
| 111 | 11 | 39725355 | T | C | rs11035428 |
| 112 | 11 | 39975331 | G | A | rs6485169 |
| 113 | 11 | 79716863 | G | A | rs717100 |
| 114 | 11 | 79772010 | T | G | rs2663205 |
| 115 | 11 | 80091064 | C | A | rs570008 |
| 116 | 11 | 95335790 | C | T | rs7125428 |
| 117 | 11 | 97429250 | T | C | rs4755065 |
| 118 | 11 | 97761882 | T | G | rs1828511 |
| 119 | 11 | 98792099 | A | G | rs2169376 |
| 120 | 11 | 113581871 | T | C | rs12365214 |
| 121 | 11 | 114998713 | T | C | rs4489780 |
| 122 | 11 | 116164654 | C | T | rs2844282 |
| 123 | 11 | 116165087 | A | G | rs1783221 |
| 124 | 11 | 116179554 | G | A | rs1783235 |
| 125 | 11 | 116248195 | T | G | rs1009746 |
| 126 | 11 | 116344392 | G | T | rs11601506 |
| 127 | 11 | 116394352 | A | G | rs537538 |
| 128 | 11 | 127812099 | T | C | rs1157862 |
| 129 | 11 | 128346944 | C | T | rs4937324 |
| 130 | 11 | 133651877 | A | G | rs10791302 |
| 131 | 11 | 133661760 | C | T | rs11223548 |
| 132 | 12 | 28684011 | T | C | rs7312487 |
| 133 | 12 | 29968780 | T | C | rs16935137 |
| 134 | 12 | 29972734 | C | G | rs1909174 |
| 135 | 12 | 33096898 | A | G | rs1392331 |
| 136 | 12 | 33234373 | G | A | rs7312915 |
| 137 | 12 | 33252392 | T | C | rs7299903 |
| 138 | 12 | 61052965 | T | C | rs1395540 |
| 139 | 12 | 61054396 | G | C | rs7974374 |
| 140 | 12 | 61338759 | A | G | rs2176199 |
| 141 | 12 | 72881620 | G | A | rs6582124 |
| 142 | 12 | 83277649 | T | C | rs7485422 |
| 143 | 12 | 83464158 | C | T | rs11115877 |
| 144 | 12 | 87368810 | G | A | rs7968713 |
| 145 | 12 | 87537289 | C | T | rs11104542 |
| 146 | 12 | 90407150 | G | A | rs7969733 |
| 147 | 12 | 102625209 | T | C | rs7298152 |
| 148 | 12 | 108015068 | C | G | rs1896061 |
| 149 | 12 | 115466253 | T | C | rs721219 |
| 150 | 13 | 22403650 | T | C | rs9510177 |
| 151 | 13 | 22458981 | A | G | rs292476 |
| 152 | 13 | 22460138 | A | T | rs2048148 |
| 153 | 13 | 34804128 | C | T | rs9572437 |
| 154 | 13 | 37323438 | G | A | rs2209245 |
| 155 | 13 | 46999481 | A | G | rs12583882 |
| 156 | 13 | 48872502 | T | C | rs9596029 |
| 157 | 13 | 55282927 | C | T | rs9537053 |
| 158 | 13 | 55704977 | A | G | rs8001026 |
| 159 | 13 | 55748392 | G | T | rs1413111 |
| 160 | 13 | 55755583 | G | A | rs9597255 |
| 161 | 13 | 57831590 | G | C | rs9563541 |
| 162 | 13 | 58631984 | A | G | rs9563622 |
| 163 | 13 | 58880034 | G | A | rs17055603 |
| 164 | 13 | 59364835 | A | G | rs1409254 |
| 165 | 13 | 61533404 | A | G | rs9563933 |
| 166 | 13 | 64197296 | A | C | rs4144113 |
| 167 | 13 | 65074363 | G | A | rs4306391 |
| 168 | 13 | 65411117 | G | C | rs9571399 |
| 169 | 13 | 66074646 | C | T | rs9540627 |
| 170 | 13 | 68145856 | G | T | rs11148761 |
| 171 | 13 | 68445189 | A | T | rs9564463 |
| 172 | 13 | 70298257 | T | C | rs10161640 |
| 173 | 13 | 70698715 | C | T | rs17087430 |
| 174 | 13 | 72328053 | T | C | rs490599 |
| 175 | 13 | 74682207 | C | T | rs9543745 |
| 176 | 13 | 74703629 | C | T | rs1327740 |
| 177 | 13 | 74707684 | A | G | rs2104615 |
| 178 | 13 | 74999239 | G | A | rs974510 |
| 179 | 13 | 76281273 | C | T | rs2174452 |
| 180 | 13 | 80235685 | A | C | rs17072502 |
| 181 | 13 | 80472630 | T | C | rs944751 |
| 182 | 13 | 81402764 | C | T | rs1334384 |
| 183 | 13 | 81791630 | T | C | rs12429667 |
| 184 | 13 | 82013133 | C | T | rs17174633 |
| 185 | 13 | 82378443 | A | T | rs9601891 |
| 186 | 13 | 83398350 | T | C | rs4074473 |
| 187 | 13 | 83766892 | A | G | rs1331944 |
| 188 | 13 | 86564329 | A | C | rs9284259 |
| 189 | 13 | 87992497 | G | T | rs11619659 |
| 190 | 13 | 88341210 | A | C | rs1993354 |
| 191 | 13 | 90657178 | T | C | rs12430684 |
| 192 | 13 | 103175477 | G | A | rs2765584 |
| 193 | 13 | 103179406 | T | C | rs9518946 |
| 194 | 13 | 103722188 | G | T | rs4459430 |
| 195 | 13 | 103730905 | G | A | rs1274749 |
| 196 | 13 | 103944701 | A | G | rs2259614 |
| 197 | 13 | 104007140 | C | T | rs1849445 |
| 198 | 13 | 104245414 | A | G | rs9586450 |
| 199 | 13 | 104335370 | A | G | rs1330527 |
| 200 | 13 | 104357291 | G | C | rs9519304 |
| 201 | 13 | 104358144 | A | G | rs9514252 |
| 202 | 13 | 104511073 | C | T | rs7981507 |
| 203 | 13 | 104598394 | G | T | rs2164080 |
| 204 | 13 | 104623579 | C | T | rs7337127 |
| 205 | 13 | 104630753 | A | C | rs496815 |
| 206 | 13 | 104675786 | G | A | rs773350 |
| 207 | 13 | 104680105 | G | T | rs773312 |
| 208 | 13 | 104916959 | G | A | rs7320561 |
| 209 | 13 | 104947926 | C | T | rs9555118 |
| 210 | 13 | 104986744 | T | C | rs9519543 |
| 211 | 13 | 104987191 | T | C | rs9634456 |
| 212 | 13 | 104987592 | T | A | rs9300980 |
| 213 | 13 | 104989927 | C | A | rs9300981 |
| 214 | 13 | 105211762 | A | G | rs3015350 |
| 215 | 13 | 105276911 | C | T | rs7989487 |
| 216 | 13 | 105285190 | T | C | rs9519641 |
| 217 | 13 | 105288707 | G | C | rs9301014 |
| 218 | 13 | 108059883 | C | T | rs1325389 |
| 219 | 13 | 111448590 | T | C | rs9560075 |
| 220 | 14 | 26334093 | C | A | rs1956509 |
| 221 | 14 | 27951885 | A | G | rs11624431 |
| 222 | 14 | 27997327 | A | G | rs1888385 |
| 223 | 14 | 27997820 | C | T | rs2251721 |
| 224 | 14 | 27997930 | A | G | rs2775279 |
| 225 | 14 | 27998525 | A | G | rs6575994 |
| 226 | 14 | 28018102 | T | C | rs1013379 |
| 227 | 14 | 38497401 | A | G | rs11628255 |
| 228 | 14 | 43762866 | T | C | rs1957280 |
| 229 | 14 | 48944485 | G | A | rs2352906 |
| 230 | 14 | 49189123 | G | A | rs8011197 |
| 231 | 14 | 62252583 | A | T | rs1399523 |
| 232 | 14 | 80077778 | A | G | rs1181353 |
| 233 | 14 | 82132173 | T | A | rs17116374 |
| 234 | 14 | 82531231 | T | C | rs12435137 |
| 235 | 14 | 83170173 | G | C | rs7152994 |
| 236 | 14 | 83481552 | A | G | rs4243668 |
| 237 | 14 | 83533399 | G | A | rs1241925 |
| 238 | 14 | 83628044 | T | C | rs7144922 |
| 239 | 14 | 84285197 | T | C | rs8019836 |
| 240 | 14 | 84844447 | G | A | rs1483065 |
| 241 | 14 | 85755382 | C | T | rs8009268 |
| 242 | 14 | 86629516 | G | A | rs4899905 |
| 243 | 15 | 37595807 | A | T | rs8023501 |
| 244 | 15 | 37671684 | T | C | rs16965448 |
| 245 | 15 | 37795999 | A | G | rs4924192 |
| 246 | 15 | 46206243 | G | A | rs1897841 |
| 247 | 15 | 53233218 | C | T | rs10163018 |
| 248 | 15 | 87152512 | A | G | rs11632375 |
| 249 | 15 | 87154857 | G | A | rs10152178 |
| 250 | 15 | 96948385 | T | C | rs1468626 |
| 251 | 15 | 96973890 | C | T | rs11630458 |
| 252 | 16 | 17667817 | T | C | rs8053673 |
| 253 | 16 | 25585119 | G | A | rs205163 |
| 254 | 16 | 26938339 | G | T | rs9806926 |
| 255 | 16 | 26946375 | T | C | rs11074811 |
| 256 | 16 | 26950631 | G | A | rs12447485 |
| 257 | 16 | 26963686 | T | G | rs4238945 |
| 258 | 16 | 52816487 | A | G | rs16951610 |
| 259 | 16 | 55149989 | C | T | rs1463632 |
| 260 | 16 | 60154373 | T | C | rs929854 |
| 261 | 16 | 60757487 | T | G | rs11076411 |
| 262 | 16 | 61270284 | G | T | rs16963190 |
| 263 | 16 | 62702897 | C | T | rs4131140 |
| 264 | 16 | 64047131 | T | C | rs16966908 |
| 265 | 16 | 64842774 | G | T | rs1005822 |
| 266 | 16 | 66040422 | G | T | rs11075616 |
| 267 | 16 | 66061838 | G | A | rs7184941 |
| 268 | 16 | 75962058 | A | G | rs1498059 |
| 269 | 16 | 82311978 | T | C | rs2906802 |
| 270 | 17 | 10990482 | A | C | rs7219444 |
| 271 | 17 | 10995136 | A | G | rs758112 |
| 272 | 17 | 14595973 | C | G | rs8074338 |
| 273 | 17 | 14604697 | T | A | rs11078260 |
| 274 | 17 | 52642873 | C | T | rs2452236 |
| 275 | 17 | 65356847 | G | A | rs6504297 |
| 276 | 17 | 70471938 | G | C | rs4080890 |
| 277 | 17 | 70883284 | A | G | rs17223678 |
| 278 | 17 | 71399303 | G | A | rs917345 |
| 279 | 17 | 71399807 | C | T | rs8071270 |
| 280 | 18 | 4564126 | A | G | rs8095810 |
| 281 | 18 | 4615729 | C | T | rs4372777 |
| 282 | 18 | 25458254 | T | G | rs4800216 |
| 283 | 18 | 25541579 | T | G | rs1627290 |
| 284 | 18 | 28283384 | C | T | rs1548755 |
| 285 | 18 | 29775114 | T | A | rs9635913 |
| 286 | 18 | 29823325 | A | G | rs16947191 |
| 287 | 18 | 29858338 | G | A | rs12960708 |
| 288 | 18 | 29923528 | T | C | rs12607637 |
| 289 | 18 | 30517355 | G | T | rs41379044 |
| 290 | 18 | 34330004 | A | G | rs12968586 |
| 291 | 18 | 38092452 | C | A | rs9966896 |
| 292 | 18 | 38127720 | C | T | rs4800001 |
| 293 | 18 | 38380962 | C | T | rs958801 |
| 294 | 18 | 38387518 | T | C | rs1511939 |
| 295 | 18 | 38464762 | C | T | rs991045 |
| 296 | 18 | 38465748 | C | T | rs10502693 |
| 297 | 18 | 38474197 | C | T | rs5000343 |
| 298 | 18 | 38474263 | C | T | rs2217109 |
| 299 | 18 | 38482221 | T | A | rs9959302 |
| 300 | 18 | 38483159 | C | T | rs12962345 |
| 301 | 18 | 38795294 | G | T | rs9946289 |
| 302 | 18 | 40350048 | T | A | rs16973135 |
| 303 | 18 | 40375825 | A | C | rs2862365 |
| 304 | 18 | 40437661 | C | A | rs16973361 |
| 305 | 18 | 40907143 | A | G | rs974309 |
| 306 | 18 | 40944295 | C | A | rs1869282 |
| 307 | 18 | 43386920 | C | T | rs684289 |
| 308 | 18 | 51950685 | A | G | rs2953258 |
| 309 | 18 | 53731968 | T | C | rs3906453 |
| 310 | 18 | 56327706 | C | T | rs12150697 |
| 311 | 18 | 56382009 | T | C | rs216568 |
| 312 | 18 | 61155719 | C | G | rs10513926 |
| 313 | 18 | 64524418 | T | C | rs8092218 |
| 314 | 18 | 64540623 | A | T | rs4531842 |
| 315 | 18 | 65288133 | C | T | rs1505996 |
| 316 | 18 | 67255462 | A | G | rs11875127 |
| 317 | 18 | 70783769 | A | G | rs17083161 |
| 318 | 18 | 70826008 | A | T | rs12606536 |
| 319 | 18 | 71340217 | A | G | rs1244840 |
| 320 | 18 | 71373343 | T | C | rs334428 |
| 321 | 18 | 72206367 | A | C | rs10871696 |
| 322 | 18 | 72240489 | G | T | rs7232482 |
| 323 | 18 | 72289278 | A | T | rs4530251 |
| 324 | 18 | 72291789 | C | G | rs4891990 |
| 325 | 18 | 72301864 | C | G | rs7230444 |
| 326 | 18 | 72351642 | C | A | rs9949765 |
| 327 | 18 | 72431957 | T | C | rs12456190 |
| 328 | 18 | 72982202 | A | G | rs9951195 |
| 329 | 18 | 73037239 | C | T | rs8093852 |
| 330 | 18 | 73565234 | C | T | rs4892113 |
| 331 | 18 | 73580087 | T | C | rs9967039 |
| 332 | 18 | 77751986 | A | G | rs8090827 |
| 333 | 18 | 77763393 | C | T | rs2727057 |
| 334 | 18 | 78242654 | A | C | rs4458091 |
| 335 | 18 | 78253589 | C | T | rs7239178 |
| 336 | 18 | 78306845 | T | C | rs612097 |
| 337 | 18 | 78650533 | A | G | rs2016252 |
| 338 | 18 | 78671563 | G | A | rs4798975 |
| 339 | 18 | 78675166 | G | A | rs12605652 |
| 340 | 2 | 2433302 | A | G | rs7577250 |
| 341 | 2 | 2522406 | G | A | rs10865530 |
| 342 | 2 | 2529716 | C | G | rs11676482 |
| 343 | 2 | 2536520 | A | C | rs2037148 |
| 344 | 2 | 4242754 | A | G | rs17018897 |
| 345 | 2 | 4246747 | T | G | rs1105752 |
| 346 | 2 | 4281788 | G | A | rs6760082 |
| 347 | 2 | 4359522 | C | A | rs2314218 |
| 348 | 2 | 5414407 | G | A | rs12466470 |
| 349 | 2 | 6106273 | G | A | rs6719357 |
| 350 | 2 | 22649032 | G | A | rs1484679 |
| 351 | 2 | 35826675 | C | A | rs4109145 |
| 352 | 2 | 36140420 | A | G | rs10174078 |
| 353 | 2 | 40868073 | G | A | rs1379026 |
| 354 | 2 | 41259375 | A | G | rs1991080 |
| 355 | 2 | 41420114 | A | G | rs17027678 |
| 356 | 2 | 41569117 | A | G | rs1975062 |
| 357 | 2 | 41601181 | G | A | rs12989506 |
| 358 | 2 | 53132207 | C | A | rs1900247 |
| 359 | 2 | 53266121 | G | C | rs195611 |
| 360 | 2 | 60213064 | G | C | rs11125832 |
| 361 | 2 | 80980289 | G | A | rs10520291 |
| 362 | 2 | 81766792 | A | G | rs1221175 |
| 363 | 2 | 82114606 | C | T | rs1402774 |
| 364 | 2 | 83323948 | G | C | rs6745924 |
| 365 | 2 | 104271947 | A | C | rs12992682 |
| 366 | 2 | 116040546 | G | A | rs1842420 |
| 367 | 2 | 117641566 | A | C | rs2048819 |
| 368 | 2 | 118461803 | G | T | rs7566562 |
| 369 | 2 | 118535500 | C | T | rs11674141 |
| 370 | 2 | 118641592 | C | G | rs1349459 |
| 371 | 2 | 123177446 | G | A | rs6734319 |
| 372 | 2 | 128684458 | T | C | rs28608534 |
| 373 | 2 | 128718773 | C | T | rs6431023 |
| 374 | 2 | 128745702 | T | G | rs10168422 |
| 375 | 2 | 128783968 | C | T | rs12473285 |
| 376 | 2 | 133698922 | G | A | rs6430444 |
| 377 | 2 | 133825743 | T | C | rs6430460 |
| 378 | 2 | 133866705 | T | C | rs4603824 |
| 379 | 2 | 133900169 | C | A | rs1446732 |
| 380 | 2 | 136648001 | C | T | rs1823084 |
| 381 | 2 | 137816741 | A | G | rs7581781 |
| 382 | 2 | 139076454 | A | T | rs10445695 |
| 383 | 2 | 142244191 | T | C | rs12463449 |
| 384 | 2 | 142660801 | C | A | rs2126000 |
| 385 | 2 | 146043609 | A | G | rs10803514 |
| 386 | 2 | 147032717 | A | G | rs16826756 |
| 387 | 2 | 147254218 | T | G | rs2890872 |
| 388 | 2 | 147600976 | C | T | rs12612855 |
| 389 | 2 | 150752251 | A | G | rs10497071 |
| 390 | 2 | 150876465 | A | G | rs12618428 |
| 391 | 2 | 152992091 | T | C | rs16831993 |
| 392 | 2 | 155831263 | T | C | rs1829525 |
| 393 | 2 | 155909118 | T | C | rs16839725 |
| 394 | 2 | 162971605 | T | C | rs1345959 |
| 395 | 2 | 162974977 | G | T | rs7599823 |
| 396 | 2 | 163441348 | C | A | rs7574166 |
| 397 | 2 | 166720864 | G | A | rs11887539 |
| 398 | 2 | 175564852 | A | G | rs9287985 |
| 399 | 2 | 180107615 | A | G | rs2056785 |
| 400 | 2 | 180132415 | G | A | rs12464448 |
| 401 | 2 | 180133957 | T | C | rs7606018 |
| 402 | 2 | 183714705 | T | C | rs13422535 |
| 403 | 2 | 184485875 | G | A | rs1992514 |
| 404 | 2 | 185061558 | G | C | rs17584976 |
| 405 | 2 | 191526144 | G | A | rs11889710 |
| 406 | 2 | 192322055 | C | T | rs4853669 |
| 407 | 2 | 192400180 | T | C | rs33957851 |
| 408 | 2 | 192468221 | A | G | rs1385350 |
| 409 | 2 | 192517040 | A | G | rs11886140 |
| 410 | 2 | 192877352 | T | C | rs2218495 |
| 411 | 2 | 193379097 | G | T | rs4420715 |
| 412 | 2 | 195131352 | T | C | rs13383422 |
| 413 | 2 | 195170744 | G | A | rs7583521 |
| 414 | 2 | 220956193 | A | G | rs11682003 |
| 415 | 2 | 221060913 | G | A | rs4672993 |
| 416 | 2 | 221818216 | A | C | rs2551201 |
| 417 | 2 | 225188804 | G | A | rs12694656 |
| 418 | 2 | 225217439 | A | G | rs6736537 |
| 419 | 2 | 225250729 | G | A | rs7571208 |
| 420 | 2 | 226546643 | A | C | rs962171 |
| 421 | 2 | 235303360 | A | G | rs1367876 |
| 422 | 2 | 235336266 | C | G | rs6414039 |
| 423 | 2 | 235392731 | G | A | rs10201495 |
| 424 | 20 | 6956198 | C | T | rs6077109 |
| 425 | 20 | 7472688 | T | C | rs4813827 |
| 426 | 20 | 12030641 | T | G | rs13037930 |
| 427 | 20 | 12030723 | A | G | rs6109233 |
| 428 | 20 | 12030940 | A | G | rs2327592 |
| 429 | 20 | 12044061 | A | G | rs1997810 |
| 430 | 20 | 12488857 | C | A | rs8182799 |
| 431 | 20 | 12675520 | T | C | rs6134626 |
| 432 | 20 | 12744370 | C | G | rs6041591 |
| 433 | 20 | 24783547 | C | T | rs226665 |
| 434 | 20 | 39449471 | C | T | rs16988070 |
| 435 | 20 | 40241479 | T | C | rs1980593 |
| 436 | 20 | 40242000 | G | C | rs2870432 |
| 437 | 20 | 40284166 | G | A | rs16988918 |
| 438 | 20 | 40354288 | T | C | rs10485671 |
| 439 | 20 | 41821595 | A | T | rs6093527 |
| 440 | 20 | 51252774 | A | G | rs1007126 |
| 441 | 20 | 54960007 | T | G | rs928165 |
| 442 | 20 | 55178061 | T | C | rs11086494 |
| 443 | 20 | 55266878 | C | T | rs6069223 |
| 444 | 20 | 56887842 | G | A | rs4810051 |
| 445 | 21 | 16974047 | G | C | rs8134480 |
| 446 | 21 | 17089525 | C | T | rs2223079 |
| 447 | 21 | 20005235 | T | C | rs2825938 |
| 448 | 21 | 22699093 | T | G | rs1513732 |
| 449 | 21 | 23592329 | A | T | rs975592 |
| 450 | 21 | 24647980 | G | T | rs2829220 |
| 451 | 21 | 24662659 | G | C | rs2829240 |
| 452 | 21 | 24737242 | G | A | rs2829310 |
| 453 | 21 | 27247990 | C | G | rs2830800 |
| 454 | 21 | 27251036 | A | G | rs2830802 |
| 455 | 22 | 34348079 | T | C | rs204276 |
| 456 | 3 | 5556979 | T | C | rs1430005 |
| 457 | 3 | 5584074 | G | A | rs6765805 |
| 458 | 3 | 5678174 | G | A | rs1545506 |
| 459 | 3 | 5760199 | G | A | rs1836577 |
| 460 | 3 | 5858280 | C | T | rs722615 |
| 461 | 3 | 22484685 | A | T | rs6769828 |
| 462 | 3 | 22549447 | G | A | rs1463223 |
| 463 | 3 | 26506852 | C | G | rs9820211 |
| 464 | 3 | 26836475 | C | T | rs7623573 |
| 465 | 3 | 26837096 | A | C | rs11129244 |
| 466 | 3 | 26864096 | C | A | rs4443123 |
| 467 | 3 | 26974564 | T | C | rs12487330 |
| 468 | 3 | 26974902 | T | C | rs17019072 |
| 469 | 3 | 30110652 | C | T | rs1032921 |
| 470 | 3 | 30122198 | A | G | rs11715853 |
| 471 | 3 | 30996454 | A | C | rs4624599 |
| 472 | 3 | 35984485 | G | T | rs11129681 |
| 473 | 3 | 61450901 | C | T | rs9872718 |
| 474 | 3 | 74622030 | C | T | rs9840407 |
| 475 | 3 | 74787877 | C | G | rs1358345 |
| 476 | 3 | 77912353 | G | T | rs11927310 |
| 477 | 3 | 78402487 | A | G | rs9837024 |
| 478 | 3 | 80320585 | C | T | rs7617987 |
| 479 | 3 | 82565752 | C | A | rs13079811 |
| 480 | 3 | 95272414 | C | T | rs17384029 |
| 481 | 3 | 103369823 | G | A | rs4074892 |
| 482 | 3 | 103739235 | T | C | rs1379623 |
| 483 | 3 | 104172135 | G | A | rs1104964 |
| 484 | 3 | 104334184 | T | C | rs9809062 |
| 485 | 3 | 105163092 | A | G | rs6770943 |
| 486 | 3 | 105262407 | A | G | rs952365 |
| 487 | 3 | 105972718 | G | T | rs13062596 |
| 488 | 3 | 105976728 | T | C | rs2655033 |
| 489 | 3 | 110087876 | G | T | rs13060275 |
| 490 | 3 | 110389488 | C | T | rs2712965 |
| 491 | 3 | 117241720 | G | A | rs12487249 |
| 492 | 3 | 117296552 | T | C | rs11716697 |
| 493 | 3 | 117358372 | A | G | rs1398641 |
| 494 | 3 | 117437585 | A | C | rs3971401 |
| 495 | 3 | 117438449 | A | G | rs16826930 |
| 496 | 3 | 135739142 | T | C | rs1447600 |
| 497 | 3 | 144290458 | G | A | rs6770845 |
| 498 | 3 | 144558491 | T | C | rs2717389 |
| 499 | 3 | 144953465 | G | A | rs6779715 |
| 500 | 3 | 145220841 | G | A | rs1348658 |
| 501 | 3 | 146732481 | T | C | rs16858832 |
| 502 | 3 | 147699834 | C | A | rs12639104 |
| 503 | 3 | 147705722 | A | G | rs2319306 |
| 504 | 3 | 147713968 | T | C | rs9653947 |
| 505 | 3 | 152945842 | A | G | rs2043854 |
| 506 | 3 | 162705247 | C | T | rs7433221 |
| 507 | 3 | 162884798 | C | T | rs9823850 |
| 508 | 3 | 176215977 | A | G | rs9848455 |
| 509 | 3 | 182265049 | A | G | rs1542695 |
| 510 | 3 | 187552363 | G | A | rs7645149 |
| 51 | 3 | 189451891 | C | G | rs3896089 |
| 512 | 3 | 189498378 | T | C | rs2600846 |
| 513 | 3 | 191833690 | G | C | rs2138537 |
| 514 | 3 | 193032457 | A | G | rs9831317 |
| 515 | 3 | 193040906 | G | A | rs6789557 |
| 516 | 3 | 193041642 | A | G | rs9851295 |
| 517 | 4 | 10917246 | G | T | rs16875484 |
| 518 | 4 | 10959364 | G | T | rs11726335 |
| 519 | 4 | 10959669 | G | A | rs7682428 |
| 520 | 4 | 11048220 | G | A | rs1110365 |
| 521 | 4 | 11049711 | C | T | rs9291486 |
| 522 | 4 | 11189846 | G | T | rs6835872 |
| 523 | 4 | 11214614 | C | T | rs10009253 |
| 524 | 4 | 13174346 | A | T | rs16888303 |
| 525 | 4 | 18314369 | A | G | rs4140904 |
| 526 | 4 | 24008164 | T | G | rs624456 |
| 527 | 4 | 24136516 | C | T | rs7663527 |
| 528 | 4 | 24224295 | A | G | rs6820131 |
| 529 | 4 | 24282415 | T | C | rs7663025 |
| 530 | 4 | 24300108 | T | G | rs7664742 |
| 531 | 4 | 27693271 | T | G | rs1031311 |
| 532 | 4 | 28092597 | G | T | rs28539715 |
| 533 | 4 | 30132426 | A | G | rs2571494 |
| 534 | 4 | 30155271 | A | C | rs6824691 |
| 535 | 4 | 30166358 | C | T | rs11930738 |
| 536 | 4 | 30387552 | T | A | rs41445348 |
| 537 | 4 | 30452690 | A | T | rs6833068 |
| 538 | 4 | 32456905 | C | G | rs11935790 |
| 539 | 4 | 34840072 | T | A | rs1467099 |
| 540 | 4 | 35071923 | G | A | rs4859335 |
| 541 | 4 | 35134580 | G | A | rs7684845 |
| 542 | 4 | 35148038 | C | A | rs1023933 |
| 543 | 4 | 35151566 | G | A | rs6852760 |
| 544 | 4 | 35222908 | C | T | rs7691687 |
| 545 | 4 | 35332851 | T | C | rs1530242 |
| 546 | 4 | 35702700 | A | G | rs1035712 |
| 547 | 4 | 45154996 | T | C | rs7654230 |
| 548 | 4 | 45173787 | T | C | rs16858082 |
| 549 | 4 | 45793878 | G | A | rs1492839 |
| 550 | 4 | 45802030 | C | T | rs1389034 |
| 551 | 4 | 57970497 | T | C | rs269829 |
| 552 | 4 | 58289243 | C | T | rs17603347 |
| 553 | 4 | 59294093 | C | A | rs7440334 |
| 554 | 4 | 62963684 | T | G | rs2660605 |
| 555 | 4 | 62979085 | A | G | rs13123702 |
| 556 | 4 | 66533925 | C | T | rs1995913 |
| 557 | 4 | 66736552 | T | C | rs10005193 |
| 558 | 4 | 66760731 | G | C | rs1947248 |
| 559 | 4 | 67195915 | G | A | rs6815091 |
| 560 | 4 | 67204598 | C | A | rs6841066 |
| 561 | 4 | 71926132 | T | C | rs1520499 |
| 562 | 4 | 72698088 | T | C | rs9291177 |
| 563 | 4 | 85368167 | A | G | rs403870 |
| 564 | 4 | 91762989 | G | A | rs6811317 |
| 565 | 4 | 93939277 | C | T | rs2578139 |
| 566 | 4 | 93962222 | T | C | rs1898636 |
| 567 | 4 | 95976372 | C | T | rs6823094 |
| 568 | 4 | 95989085 | A | C | rs263075 |
| 569 | 4 | 95995607 | G | A | rs7689809 |
| 570 | 4 | 96040740 | C | T | rs1567957 |
| 571 | 4 | 114368048 | A | G | rs4989308 |
| 572 | 4 | 114392159 | G | T | rs1962495 |
| 573 | 4 | 115244948 | C | T | rs1112531 |
| 574 | 4 | 124823148 | G | A | rs1506556 |
| 575 | 4 | 125019845 | C | G | rs2390770 |
| 576 | 4 | 125019955 | T | C | rs1391392 |
| 577 | 4 | 126260508 | T | C | rs10857112 |
| 578 | 4 | 126320991 | C | A | rs2391038 |
| 579 | 4 | 130605780 | C | T | rs7664241 |
| 580 | 4 | 130700347 | C | G | rs41331449 |
| 581 | 4 | 133370732 | T | C | rs6818278 |
| 582 | 4 | 133763089 | G | T | rs17609744 |
| 583 | 4 | 141890740 | C | T | rs1500842 |
| 584 | 4 | 155008953 | G | A | rs6820565 |
| 585 | 4 | 156246739 | C | T | rs7700147 |
| 586 | 4 | 159894529 | C | T | rs7672637 |
| 587 | 4 | 159902822 | G | A | rs6849301 |
| 588 | 4 | 160020695 | C | G | rs2711281 |
| 589 | 4 | 160367917 | C | T | rs3846242 |
| 590 | 4 | 160693235 | T | C | rs17359785 |
| 591 | 4 | 160982953 | A | G | rs4260487 |
| 592 | 4 | 164488143 | T | C | rs6834683 |
| 593 | 4 | 166626278 | G | A | rs7673076 |
| 594 | 4 | 167510453 | T | C | rs10517942 |
| 595 | 4 | 176433799 | A | G | rs2122336 |
| 596 | 4 | 178510860 | A | G | rs2614604 |
| 597 | 4 | 178520937 | C | T | rs2715538 |
| 598 | 4 | 178787228 | C | G | rs2044699 |
| 599 | 4 | 178808271 | C | A | rs4862165 |
| 600 | 4 | 179202114 | G | A | rs10028580 |
| 601 | 4 | 179249214 | C | G | rs7435849 |
| 602 | 4 | 179626828 | C | T | rs17775338 |
| 603 | 4 | 179634825 | C | T | rs6834985 |
| 604 | 4 | 179752080 | T | C | rs2100685 |
| 605 | 4 | 180218268 | C | T | rs17068958 |
| 606 | 4 | 180281999 | G | A | rs17069057 |
| 607 | 4 | 180301728 | C | T | rs13109268 |
| 608 | 4 | 180367017 | T | C | rs2309249 |
| 609 | 4 | 180391684 | G | A | rs6811892 |
| 610 | 4 | 180392768 | C | T | rs11734423 |
| 611 | 4 | 180432579 | A | G | rs2309341 |
| 612 | 4 | 180444072 | C | T | rs2727430 |
| 613 | 4 | 180861463 | C | T | rs12644875 |
| 614 | 4 | 180862831 | T | C | rs17070257 |
| 615 | 4 | 181370290 | A | G | rs17246459 |
| 616 | 5 | 2370332 | G | C | rs11949075 |
| 617 | 5 | 2371828 | G | A | rs10036994 |
| 618 | 5 | 2378722 | T | C | rs465850 |
| 619 | 5 | 2398516 | A | C | rs650640 |
| 620 | 5 | 2403330 | G | A | rs10059366 |
| 621 | 5 | 2448046 | A | G | rs6555108 |
| 622 | 5 | 2462244 | C | A | rs12655007 |
| 623 | 5 | 2466470 | C | T | rs315918 |
| 624 | 5 | 2468261 | C | A | rs924134 |
| 625 | 5 | 2491471 | A | T | rs462437 |
| 626 | 5 | 2491562 | T | C | rs16869827 |
| 627 | 5 | 2493166 | A | C | rs2453814 |
| 628 | 5 | 3068876 | A | T | rs2447672 |
| 629 | 5 | 3756952 | T | C | rs13361372 |
| 630 | 5 | 3779477 | A | G | rs6882956 |
| 631 | 5 | 3799719 | G | A | rs4702464 |
| 632 | 5 | 3856335 | C | T | rs12153260 |
| 633 | 5 | 4286823 | G | C | rs9313074 |
| 634 | 5 | 5799874 | T | A | rs7703147 |
| 635 | 5 | 5828535 | T | C | rs188684 |
| 636 | 5 | 5887319 | G | T | rs1174922 |
| 637 | 5 | 5891765 | T | C | rs1174930 |
| 638 | 5 | 12017153 | A | G | rs4544819 |
| 639 | 5 | 12054151 | T | G | rs6862695 |
| 640 | 5 | 12060558 | T | C | rs10462685 |
| 641 | 5 | 13358322 | C | T | rs4398634 |
| 642 | 5 | 18337358 | T | G | rs10942113 |
| 643 | 5 | 19337298 | T | C | rs2063564 |
| 644 | 5 | 23155971 | G | T | rs310912 |
| 645 | 5 | 23790902 | C | T | rs12186540 |
| 646 | 5 | 25554641 | T | G | rs6885503 |
| 647 | 5 | 26125530 | A | G | rs1330660 |
| 648 | 5 | 26139251 | G | A | rs13154516 |
| 649 | 5 | 26192988 | A | G | rs1411586 |
| 650 | 5 | 26231825 | A | G | rs4604153 |
| 651 | 5 | 26238085 | C | T | rs9293229 |
| 652 | 5 | 27598430 | T | G | rs4235543 |
| 653 | 5 | 27810333 | T | A | rs6864726 |
| 654 | 5 | 27853422 | T | C | rs4128292 |
| 655 | 5 | 28428784 | A | G | rs4867546 |
| 656 | 5 | 30084498 | T | C | rs4867249 |
| 657 | 5 | 30843732 | A | G | rs2066930 |
| 658 | 5 | 30883945 | T | C | rs1921092 |
| 659 | 5 | 30919759 | C | T | rs13356028 |
| 660 | 5 | 34474631 | A | G | rs6451130 |
| 661 | 5 | 44185810 | G | A | rs4293927 |
| 662 | 5 | 50265025 | C | T | rs1328254 |
| 663 | 5 | 51769467 | A | G | rs4391124 |
| 664 | 5 | 52383332 | A | C | rs4865730 |
| 665 | 5 | 52404601 | A | C | rs12521835 |
| 666 | 5 | 58277369 | A | G | rs37525 |
| 667 | 5 | 62029131 | A | G | rs1833868 |
| 668 | 5 | 62879988 | A | G | rs1402912 |
| 669 | 5 | 62887158 | T | C | rs2222395 |
| 670 | 5 | 63126263 | C | T | rs10039523 |
| 671 | 5 | 63788359 | G | A | rs1478493 |
| 672 | 5 | 63818580 | A | G | rs1478490 |
| 673 | 5 | 68668261 | T | C | rs255257 |
| 674 | 5 | 71949983 | T | C | rs1217744 |
| 675 | 5 | 84682678 | G | A | rs6866089 |
| 676 | 5 | 84707871 | T | G | rs10076429 |
| 677 | 5 | 84722872 | C | T | rs4489064 |
| 678 | 5 | 84722873 | A | G | rs4256345 |
| 679 | 5 | 84823969 | G | T | rs7709606 |
| 680 | 5 | 85956586 | C | A | rs12652144 |
| 681 | 5 | 89788656 | T | C | rs819355 |
| 682 | 5 | 91945393 | G | T | rs825388 |
| 683 | 5 | 99701395 | G | T | rs7717666 |
| 684 | 5 | 100260665 | G | A | rs326100 |
| 685 | 5 | 101683566 | A | G | rs12654056 |
| 686 | 5 | 103682011 | T | C | rs1152176 |
| 687 | 5 | 103689757 | T | C | rs9632474 |
| 688 | 5 | 103705903 | C | T | rs3906355 |
| 689 | 5 | 103750446 | G | A | rs2161495 |
| 690 | 5 | 105528850 | A | G | rs4128686 |
| 691 | 5 | 106050008 | T | G | rs960931 |
| 692 | 5 | 106649102 | T | G | rs6876851 |
| 693 | 5 | 110030010 | A | G | rs2168308 |
| 694 | 5 | 110033459 | G | T | rs4957850 |
| 695 | 5 | 110088850 | T | C | rs10515411 |
| 696 | 5 | 110161259 | T | G | rs4460176 |
| 697 | 5 | 113890004 | T | C | rs1482377 |
| 698 | 5 | 117146494 | T | C | rs7710231 |
| 699 | 5 | 119788359 | C | A | rs2973940 |
| 700 | 5 | 120894485 | T | C | rs9327172 |
| 70 | 5 | 121469167 | A | G | rs6874603 |
| 702 | 5 | 123742189 | C | T | rs17150698 |
| 703 | 5 | 123801665 | T | C | rs407364 |
| 704 | 5 | 123803526 | A | G | rs154293 |
| 705 | 5 | 123868698 | T | G | rs330676 |
| 706 | 5 | 129274581 | G | C | rs10064168 |
| 707 | 5 | 129292101 | A | C | rs252668 |
| 708 | 5 | 129292600 | C | G | rs252670 |
| 709 | 5 | 136623362 | T | C | rs10051626 |
| 710 | 5 | 143979881 | G | A | rs160870 |
| 711 | 5 | 153341040 | G | A | rs11167629 |
| 712 | 5 | 161046366 | G | A | rs4921175 |
| 713 | 5 | 161092424 | G | C | rs1387612 |
| 714 | 5 | 161092556 | G | A | rs1387611 |
| 715 | 5 | 162282821 | A | G | rs17060201 |
| 716 | 5 | 163990363 | T | G | rs6860898 |
| 717 | 5 | 166256592 | G | A | rs13163863 |
| 718 | 5 | 166520830 | G | A | rs2961857 |
| 719 | 5 | 166639250 | T | G | rs347993 |
| 720 | 5 | 171612618 | G | A | rs2879407 |
| 721 | 5 | 175097385 | A | G | rs12109464 |
| 722 | 5 | 175131495 | A | G | rs2248804 |
| 723 | 5 | 175175435 | C | A | rs13169756 |
| 724 | 5 | 175180838 | A | G | rs695221 |
| 725 | 6 | 9398662 | C | T | rs214444 |
| 726 | 6 | 15765518 | G | T | rs413080 |
| 727 | 6 | 23229496 | G | C | rs13208665 |
| 728 | 6 | 23506262 | A | G | rs199108 |
| 729 | 6 | 40101697 | G | T | rs3008841 |
| 730 | 6 | 48314914 | T | G | rs614819 |
| 731 | 6 | 48447416 | G | A | rs9395354 |
| 732 | 6 | 50290485 | C | T | rs1361504 |
| 733 | 6 | 51015810 | G | A | rs9357680 |
| 734 | 6 | 51258411 | A | T | rs2465049 |
| 735 | 6 | 51260442 | C | T | rs2465034 |
| 736 | 6 | 61063311 | T | C | rs3863232 |
| 737 | 6 | 66291673 | A | C | rs2188585 |
| 738 | 6 | 66320742 | G | T | rs6455096 |
| 739 | 6 | 66837013 | A | G | rs4395708 |
| 740 | 6 | 67314965 | C | T | rs9363740 |
| 741 | 6 | 69490352 | G | A | rs1831196 |
| 742 | 6 | 76194419 | A | G | rs4467744 |
| 743 | 6 | 78709713 | A | G | rs10485127 |
| 744 | 6 | 80660369 | G | A | rs2061044 |
| 745 | 6 | 82770749 | A | G | rs4111785 |
| 746 | 6 | 86541476 | A | G | rs952571 |
| 747 | 6 | 90688053 | T | A | rs8180550 |
| 748 | 6 | 90781546 | G | C | rs1145757 |
| 749 | 6 | 90808976 | T | C | rs4707649 |
| 750 | 6 | 90811724 | G | C | rs1394248 |
| 751 | 6 | 90929095 | A | G | rs1016075 |
| 752 | 6 | 90929121 | A | T | rs1016074 |
| 753 | 6 | 90929604 | C | T | rs1145807 |
| 754 | 6 | 90988142 | T | G | rs9353772 |
| 755 | 6 | 91083391 | C | T | rs10944520 |
| 756 | 6 | 91130011 | A | G | rs9362831 |
| 757 | 6 | 91132198 | G | A | rs4128787 |
| 758 | 6 | 91134791 | C | T | rs9345098 |
| 759 | 6 | 94548200 | A | G | rs2208173 |
| 760 | 6 | 94712496 | T | G | rs6911710 |
| 761 | 6 | 95388320 | G | A | rs2890370 |
| 762 | 6 | 98512999 | G | A | rs150394 |
| 763 | 6 | 99749409 | G | A | rs7742890 |
| 764 | 6 | 102190424 | G | C | rs6902587 |
| 765 | 6 | 102580272 | T | C | rs7758751 |
| 766 | 6 | 102853749 | C | T | rs1431222 |
| 767 | 6 | 103705995 | A | T | rs4945935 |
| 768 | 6 | 104288295 | G | A | rs201204 |
| 769 | 6 | 112723118 | C | T | rs6920975 |
| 770 | 6 | 115749483 | T | C | rs9320547 |
| 771 | 6 | 119496835 | T | C | rs9374799 |
| 772 | 6 | 119563003 | G | A | rs1499564 |
| 773 | 6 | 120117704 | G | T | rs1475164 |
| 774 | 6 | 120188045 | T | C | rs155162 |
| 775 | 6 | 121961831 | A | G | rs1521216 |
| 776 | 6 | 122050973 | C | A | rs9372675 |
| 777 | 6 | 137328957 | C | T | rs1145965 |
| 778 | 6 | 137367252 | C | T | rs12212642 |
| 779 | 6 | 140320875 | T | C | rs12055615 |
| 780 | 6 | 141121688 | A | G | rs4385332 |
| 781 | 6 | 141132008 | T | C | rs7738388 |
| 782 | 6 | 141848344 | C | T | rs9389952 |
| 783 | 6 | 144959017 | G | A | rs9390266 |
| 784 | 6 | 145049586 | T | C | rs2153143 |
| 785 | 6 | 153788411 | A | G | rs12213446 |
| 786 | 6 | 155755673 | C | T | rs2353784 |
| 787 | 6 | 164449032 | A | G | rs9347854 |
| 788 | 6 | 164553942 | A | G | rs9459136 |
| 789 | 6 | 164564773 | G | A | rs4709863 |
| 790 | 6 | 164642176 | G | T | rs8180617 |
| 791 | 7 | 9344656 | T | A | rs12531647 |
| 792 | 7 | 9348488 | A | G | rs17161591 |
| 793 | 7 | 9494494 | T | C | rs2350850 |
| 794 | 7 | 10342422 | T | C | rs6415296 |
| 795 | 7 | 19248756 | T | C | rs17140993 |
| 796 | 7 | 41233817 | A | G | rs2051870 |
| 797 | 7 | 41274867 | C | T | rs417916 |
| 798 | 7 | 41275609 | T | A | rs452475 |
| 799 | 7 | 41377410 | T | G | rs12701888 |
| 800 | 7 | 41377669 | C | T | rs10267966 |
| 801 | 7 | 41379974 | C | T | rs273085 |
| 802 | 7 | 41470579 | T | A | rs273146 |
| 803 | 7 | 42388980 | C | T | rs12530988 |
| 804 | 7 | 42456896 | A | C | rs1123227 |
| 805 | 7 | 42457429 | T | C | rs12673844 |
| 806 | 7 | 49029150 | T | C | rs12718319 |
| 807 | 7 | 49114242 | G | T | rs4486140 |
| 808 | 7 | 49360186 | G | A | rs10227315 |
| 809 | 7 | 51967064 | T | C | rs453828 |
| 810 | 7 | 52372127 | G | A | rs3735071 |
| 811 | 7 | 52720540 | T | C | rs9690428 |
| 812 | 7 | 52726918 | T | C | rs1528995 |
| 813 | 7 | 54080254 | A | G | rs12540328 |
| 814 | 7 | 61089312 | G | A | rs13247259 |
| 815 | 7 | 67472597 | G | C | rs11978872 |
| 816 | 7 | 67901460 | G | T | rs10240492 |
| 817 | 7 | 68477082 | T | A | rs6944505 |
| 818 | 7 | 68851831 | T | A | rs17670760 |
| 819 | 7 | 71008019 | C | T | rs1525293 |
| 820 | 7 | 81075164 | C | T | rs17154740 |
| 821 | 7 | 83765933 | A | G | rs10249800 |
| 822 | 7 | 83848354 | C | T | rs10487868 |
| 823 | 7 | 84687890 | G | A | rs4278108 |
| 824 | 7 | 86322767 | G | A | rs6977312 |
| 825 | 7 | 97307465 | G | A | rs2394621 |
| 826 | 7 | 109098880 | A | G | rs7806371 |
| 827 | 7 | 113314158 | G | A | rs10240906 |
| 828 | 7 | 113596455 | T | A | rs2462671 |
| 829 | 7 | 113653136 | A | G | rs6962827 |
| 830 | 7 | 114796071 | T | C | rs4366023 |
| 831 | 7 | 115334141 | T | A | rs7777244 |
| 832 | 7 | 126066219 | C | T | rs6958891 |
| 833 | 7 | 145433787 | A | G | rs850398 |
| 834 | 7 | 153040171 | T | C | rs6464300 |
| 835 | 7 | 153245595 | C | T | rs1882828 |
| 836 | 8 | 5242887 | G | C | rs6558984 |
| 837 | 8 | 20800719 | C | T | rs7000415 |
| 838 | 8 | 34451965 | A | G | rs958085 |
| 839 | 8 | 34666892 | G | A | rs7464104 |
| 840 | 8 | 34666961 | T | C | rs4455823 |
| 841 | 8 | 41137620 | C | T | rs4736795 |
| 842 | 8 | 41139405 | A | G | rs13273599 |
| 843 | 8 | 41139982 | G | C | rs4736924 |
| 844 | 8 | 51115453 | A | G | rs7824553 |
| 845 | 8 | 59239001 | C | T | rs4237030 |
| 846 | 8 | 77126826 | C | T | rs10095813 |
| 847 | 8 | 77639021 | T | C | rs748 |
| 848 | 8 | 83525360 | C | A | rs4418335 |
| 849 | 8 | 88994211 | G | A | rs1994441 |
| 850 | 8 | 97462688 | A | G | rs6995779 |
| 851 | 8 | 97507691 | G | A | rs11784202 |
| 852 | 8 | 106874764 | T | C | rs7827343 |
| 853 | 8 | 107748427 | A | G | rs7005234 |
| 854 | 8 | 110219023 | T | C | rs2350886 |
| 855 | 8 | 113719319 | C | T | rs1377226 |
| 856 | 8 | 113778550 | T | C | rs7000988 |
| 857 | 8 | 115236105 | A | T | rs2980415 |
| 858 | 8 | 115237679 | G | A | rs12677395 |
| 859 | 8 | 117650318 | T | C | rs1508569 |
| 860 | 8 | 121223780 | C | T | rs12542986 |
| 861 | 8 | 122302054 | C | T | rs7012904 |
| 862 | 8 | 131608452 | A | G | rs277037 |
| 863 | 8 | 137215832 | A | C | rs4909357 |
| 864 | 8 | 139229983 | C | T | rs12543243 |
| 865 | 8 | 139285847 | C | G | rs7829324 |
| 866 | 8 | 139324635 | C | A | rs4736071 |
| 867 | 8 | 139342742 | C | T | rs4736253 |
| 868 | 8 | 139345969 | A | G | rs6980509 |
| 869 | 9 | 1436134 | T | C | rs876977 |
| 870 | 9 | 1654460 | T | C | rs771901 |
| 871 | 9 | 8090484 | T | C | rs12237393 |
| 872 | 9 | 11129139 | T | C | rs10809353 |
| 873 | 9 | 12402842 | A | G | rs2773858 |
| 874 | 9 | 20096360 | C | T | rs10757118 |
| 875 | 9 | 20178682 | C | T | rs1413254 |
| 876 | 9 | 24298510 | A | C | rs6475790 |
| 877 | 9 | 24707196 | C | T | rs16908722 |
| 878 | 9 | 24717138 | T | A | rs16908747 |
| 879 | 9 | 24750181 | T | G | rs7849050 |
| 880 | 9 | 24769580 | A | C | rs4319187 |
| 881 | 9 | 25212651 | G | A | rs1412517 |
| 882 | 9 | 25297842 | C | A | rs1156347 |
| 883 | 9 | 26222210 | G | A | rs1369203 |
| 884 | 9 | 26333944 | T | C | rs1336466 |
| 885 | 9 | 26359487 | C | T | rs915508 |
| 886 | 9 | 26457172 | T | C | rs1328425 |
| 887 | 9 | 27723715 | G | A | rs2026147 |
| 888 | 9 | 27724118 | G | A | rs13286192 |
| 889 | 9 | 29022154 | C | T | rs10968887 |
| 890 | 9 | 29434259 | T | A | rs1888817 |
| 891 | 9 | 31837336 | A | G | rs10511887 |
| 892 | 9 | 31873013 | G | A | rs943926 |
| 893 | 9 | 31895375 | A | G | rs10970585 |
| 894 | 9 | 38250852 | G | A | rs12337623 |
| 895 | 9 | 73280787 | T | C | rs10125086 |
| 896 | 9 | 74109040 | A | G | rs10869324 |
| 897 | 9 | 74172675 | A | G | rs966266 |
| 898 | 9 | 78467599 | C | T | rs12351660 |
| 899 | 9 | 78863824 | C | A | rs6559423 |
| 900 | 9 | 78893663 | G | A | rs4877311 |
| 901 | 9 | 78900517 | C | T | rs1347815 |
| 902 | 9 | 80144393 | G | A | rs10512097 |
| 903 | 9 | 80223270 | C | A | rs617941 |
| 904 | 9 | 80972229 | G | T | rs10780476 |
| 905 | 9 | 81175482 | C | T | rs2777678 |
| 906 | 9 | 103799644 | A | C | rs988692 |
| 907 | 9 | 103801174 | G | T | rs7046401 |
| 908 | 9 | 108510416 | C | A | rs28615905 |
| 909 | 9 | 118200004 | A | G | rs12551731 |
| 910 | 9 | 118248454 | G | A | rs2149010 |
| 911 | 9 | 118315750 | A | G | rs10124323 |
| 912 | 9 | 118319036 | C | T | rs7047454 |
| 913 | 9 | 118559223 | A | G | rs7036491 |
| 914 | 9 | 118563946 | G | A | rs4294251 |
| 915 | 9 | 118870424 | T | C | rs4145935 |
| 916 | 9 | 119680227 | A | G | rs6415829 |
| 917 | 9 | 120076996 | G | A | rs7870808 |
| 918 | 9 | 124137173 | G | A | rs2638384 |

### 2-1: Discovery of 482 SNP Markers

[0256] SNP markers were discovered following the same process in Example 2-1 described above and following the sequence shown in the schematic diagram in FIG. 2, except that to further reduce the number of SNP markers from the 918 SNP markers extracted above, only those SNPs having an allele frequency of about 0.4 to 0.6 in Korean populations were extracted. As a result, finally 482 SNP markers were discovered. The 918 SNPs discovered in Example 2-1 above and the 482 SNPs discovered in Example 2-2 here are different from each other.

[0257] More specifically as shown in FIG. 2, 1,856,032 SNPs were discovered as a result of selecting loci at HWE, 72,701 SNPs were discovered as a result of excluding SNPs within or near genomic regions, 11,662 SNPs were discovered as a result of excluding SNP loci using heterozygosity of Kovariome, 1,227 SNPs were discovered as a result of excluding SNP loci in linkage disequilibrium, and as a result of excluding SNP loci in repeated regions therefrom, finally a panel of 482 SNPs were discovered.

[0258] 482 SNPs selected for kinship identification in Korean are shown in Table 2 below, and sequences, each consisting of 201 nucleotides including each SNP at position 101, are shown in SEQ ID NO: 919 to SEQ ID NO: 1400. The position of the SNP on the chromosome is expressed with respect to human reference genome GRCh38 (hg38), and each SNP may have reference allele (ref. allele) or an alternative allele (alt. allele) positioned at position 101 [n]. In addition, reference SNP cluster ID numbers (rs #) of dbSNP, which is an open database provided by NCBI, were cited together.

TABLE 2

| SEQ ID | | Position | Ref. | Alt. | |
|---|---|---|---|---|---|
| NO: | Chromosome # | (GRCh38) | Allele | Allele | dbSNP rs# |
| 919 | 1 | 29604465 | C | T | rs10914306 |
| 920 | 1 | 30527344 | G | A | rs385109 |
| 921 | 1 | 30587633 | A | C | rs472061 |
| 922 | 1 | 34488255 | T | G | rs4653045 |
| 923 | 1 | 34522675 | A | T | rs7556065 |
| 924 | 1 | 79684353 | A | T | rs1479739 |
| 925 | 1 | 79770134 | T | C | rs12022561 |
| 926 | 1 | 80793258 | C | T | rs2147084 |
| 927 | 1 | 98389610 | G | A | rs728656 |
| 928 | 1 | 98527441 | G | A | rs1081415 |
| 929 | 1 | 101495586 | T | G | rs4907942 |
| 930 | 1 | 101509262 | T | C | rs187823 |
| 931 | 1 | 102097084 | C | A | rs6684718 |
| 932 | 1 | 102489787 | A | G | rs1934710 |
| 933 | 1 | 104435454 | C | T | rs994637 |
| 934 | 1 | 104460389 | A | C | rs7417401 |
| 935 | 1 | 105132509 | C | A | rs6700492 |
| 936 | 1 | 105135344 | T | C | rs4399210 |
| 937 | 1 | 105175009 | A | G | rs4847034 |
| 938 | 1 | 106256205 | G | C | rs10881377 |
| 939 | 1 | 106648863 | A | G | rs10785799 |
| 940 | 1 | 118369123 | T | C | rs7541204 |
| 941 | 1 | 118450338 | G | A | rs2798449 |
| 942 | 1 | 163617565 | G | T | rs10917813 |
| 943 | 1 | 164034133 | G | A | rs2346420 |
| 944 | 1 | 187817530 | G | T | rs2430184 |
| 945 | 1 | 187853414 | G | C | rs2430147 |
| 946 | 1 | 191496601 | G | C | rs1338033 |
| 947 | 1 | 191560373 | T | A | rs1113634 |
| 948 | 1 | 195163463 | C | T | rs598224 |
| 949 | 1 | 195871676 | A | G | rs4256795 |
| 950 | 1 | 208472915 | T | C | rs12024584 |
| 951 | 1 | 208868883 | G | A | rs6692199 |
| 952 | 1 | 214768252 | G | A | rs12022703 |
| 953 | 1 | 217238392 | G | A | rs7542498 |
| 954 | 1 | 218654513 | T | C | rs1481345 |
| 955 | 1 | 218688412 | T | A | rs1383759 |
| 956 | 1 | 218765222 | C | T | rs9431104 |
| 957 | 1 | 221010746 | T | C | rs1360887 |
| 958 | 1 | 238648216 | G | A | rs12729311 |
| 959 | 10 | 9564609 | C | T | rs1324884 |
| 960 | 10 | 9595693 | T | A | rs11256268 |
| 961 | 10 | 20655689 | G | T | rs11012237 |
| 962 | 10 | 29068578 | A | G | rs12767581 |
| 963 | 10 | 29085839 | C | T | rs517770 |
| 964 | 10 | 29103651 | C | T | rs540804 |
| 965 | 10 | 57615107 | C | T | rs4463781 |
| 966 | 10 | 61227405 | G | A | rs10821875 |
| 967 | 10 | 81366347 | C | T | rs561182 |
| 968 | 10 | 81574714 | A | G | rs11190474 |
| 969 | 10 | 83556706 | T | A | rs7081137 |
| 970 | 10 | 84834585 | G | A | rs2991926 |
| 971 | 10 | 109054770 | T | C | rs723483 |
| 972 | 10 | 125292604 | A | G | rs3851566 |
| 973 | 10 | 128431579 | T | G | rs12782052 |
| 974 | 10 | 128549205 | A | G | rs12413518 |
| 975 | 10 | 128800718 | G | A | rs12783941 |
| 976 | 11 | 26825763 | C | T | rs1375971 |
| 977 | 11 | 36877200 | C | T | rs7120395 |
| 978 | 11 | 36977052 | A | G | rs11033894 |
| 979 | 11 | 39379076 | A | G | rs994587 |
| 980 | 11 | 39677236 | T | C | rs11035405 |
| 981 | 11 | 42834470 | C | T | rs7118693 |
| 982 | 11 | 42835318 | C | T | rs6485361 |
| 983 | 11 | 48744042 | A | C | rs10769445 |
| 984 | 11 | 91521201 | G | A | rs4753336 |
| 985 | 11 | 98834858 | C | T | rs7925701 |
| 986 | 11 | 100459226 | C | T | rs11224242 |
| 987 | 11 | 113586326 | T | C | rs10750026 |
| 988 | 11 | 114823551 | C | T | rs12279327 |
| 989 | 11 | 114990330 | G | A | rs7944043 |
| 990 | 11 | 116057018 | T | A | rs11826183 |
| 991 | 11 | 116126245 | C | T | rs489357 |
| 992 | 11 | 116134453 | T | C | rs576425 |
| 993 | 11 | 127508316 | G | T | rs10790898 |
| 994 | 11 | 127522266 | G | C | rs17187 |
| 995 | 11 | 127787176 | A | G | rs10790919 |
| 996 | 12 | 29886091 | G | A | rs12302114 |
| 997 | 12 | 37727134 | A | G | rs1663281 |
| 998 | 12 | 69101047 | T | G | rs7397436 |
| 999 | 12 | 72873355 | C | T | rs7962306 |
| 1000 | 12 | 74909600 | A | C | rs6582255 |
| 1001 | 12 | 82112924 | C | G | rs12829083 |
| 1002 | 12 | 82115234 | G | A | rs7968088 |
| 1003 | 12 | 84558692 | T | A | rs10779106 |
| 1004 | 12 | 87493362 | G | A | rs1603406 |
| 1005 | 13 | 23033352 | C | A | rs9552805 |
| 1006 | 13 | 31588766 | A | G | rs202451 |
| 1007 | 13 | 34807654 | T | G | rs13378363 |
| 1008 | 13 | 37370702 | G | A | rs9594199 |
| 1009 | 13 | 47110259 | G | C | rs9567787 |
| 1010 | 13 | 55866632 | T | C | rs2645931 |
| 1011 | 13 | 56726154 | A | G | rs812612 |
| 1012 | 13 | 56990794 | T | C | rs7995965 |
| 1013 | 13 | 56991225 | A | G | rs7995278 |
| 1014 | 13 | 64671768 | G | T | rs359365 |
| 1015 | 13 | 64768896 | C | T | rs9540214 |
| 1016 | 13 | 69512112 | T | C | rs9572181 |
| 1017 | 13 | 70307833 | T | C | rs9592695 |
| 1018 | 13 | 72216211 | A | G | rs488071 |
| 1019 | 13 | 84680934 | T | C | rs4284530 |
| 1020 | 13 | 86567392 | T | C | rs8000086 |
| 1021 | 13 | 103176202 | G | A | rs7990727 |
| 1022 | 13 | 103176464 | C | T | rs1750410 |
| 1023 | 13 | 103176493 | G | A | rs1730643 |
| 1024 | 13 | 103226212 | A | G | rs6491731 |
| 1025 | 13 | 103545411 | A | G | rs2390905 |
| 1026 | 13 | 103617386 | T | C | rs996758 |
| 1027 | 13 | 103720841 | T | C | rs2065391 |
| 1028 | 13 | 104362873 | G | A | rs1590919 |
| 1029 | 13 | 104522717 | A | C | rs9300939 |
| 1030 | 13 | 105067040 | T | C | rs9519577 |
| 1031 | 13 | 105235992 | G | A | rs3015358 |
| 1032 | 14 | 43833881 | G | C | rs941943 |
| 1033 | 14 | 62322229 | G | T | rs8012287 |
| 1034 | 14 | 82897096 | A | G | rs6574729 |
| 1035 | 14 | 83205008 | G | A | rs8013139 |
| 1036 | 14 | 83376648 | T | G | rs229807 |
| 1037 | 14 | 84313150 | C | T | rs10148642 |
| 1038 | 14 | 86616242 | C | T | rs6574903 |
| 1039 | 15 | 37678161 | G | A | rs8038727 |
| 1040 | 15 | 53255483 | G | A | rs4776123 |
| 1041 | 15 | 96954277 | T | G | rs6496198 |
| 1042 | 15 | 96977000 | T | C | rs12900387 |
| 1043 | 16 | 17642369 | T | C | rs9923864 |
| 1044 | 16 | 26929850 | G | A | rs11074808 |
| 1045 | 16 | 26938513 | T | C | rs4787393 |
| 1046 | 16 | 26949195 | C | G | rs9929685 |
| 1047 | 16 | 48961634 | G | C | rs12598934 |
| 1048 | 16 | 51903322 | T | C | rs2386959 |
| 1049 | 16 | 59318853 | T | A | rs2081227 |
| 1050 | 16 | 60193214 | G | T | rs12598588 |
| 1051 | 16 | 61421425 | G | C | rs4784117 |
| 1052 | 16 | 79387940 | G | T | rs12444602 |
| 1053 | 16 | 79927433 | A | G | rs4889046 |
| 1054 | 16 | 82321149 | G | A | rs2967364 |
| 1055 | 17 | 10982759 | C | G | rs4522450 |
| 1056 | 17 | 11025731 | C | T | rs7211507 |
| 1057 | 17 | 14523242 | C | G | rs11078254 |
| 1058 | 17 | 52262307 | G | C | rs1486751 |
| 1059 | 17 | 52270460 | C | G | rs7220900 |
| 1060 | 17 | 65347054 | T | C | rs6504295 |
| 1061 | 17 | 70885429 | T | C | rs2367119 |
| 1062 | 18 | 4571090 | C | A | rs7230421 |
| 1063 | 18 | 28348700 | C | T | rs7237664 |
| 1064 | 18 | 30562573 | T | C | rs2617892 |
| 1065 | 18 | 38440132 | C | T | rs7241992 |
| 1066 | 18 | 38461161 | T | C | rs7232769 |
| 1067 | 18 | 38482597 | G | A | rs9947632 |
| 1068 | 18 | 38525993 | C | T | rs12965155 |
| 1069 | 18 | 41139108 | C | T | rs17696192 |
| 1070 | 18 | 43634254 | C | T | rs12455868 |
| 1071 | 18 | 56461832 | C | T | rs374277 |
| 1072 | 18 | 61158634 | T | G | rs242717 |
| 1073 | 18 | 66722766 | A | G | rs11659281 |
| 1074 | 18 | 72232917 | G | A | rs8084367 |
| 1075 | 18 | 72383000 | A | G | rs7505475 |
| 1076 | 18 | 73006310 | A | C | rs11151820 |
| 1077 | 18 | 73024567 | C | T | rs1114342 |
| 1078 | 19 | 24338821 | G | A | rs3976345 |
| 1079 | 2 | 4375557 | C | G | rs12052610 |
| 1080 | 2 | 5054916 | A | G | rs6714934 |
| 1081 | 2 | 5135113 | T | C | rs1453760 |
| 1082 | 2 | 5205599 | A | G | rs4462764 |
| 1083 | 2 | 5431227 | A | G | rs13412303 |
| 1084 | 2 | 35575230 | C | T | rs11678496 |
| 1085 | 2 | 35897209 | C | T | rs1524144 |
| 1086 | 2 | 35897322 | G | T | rs1524145 |
| 1087 | 2 | 35909964 | C | T | rs12712470 |
| 1088 | 2 | 36152577 | G | A | rs1167454 |
| 1089 | 2 | 40879880 | G | A | rs982428 |
| 1090 | 2 | 49709726 | A | G | rs1914778 |
| 1091 | 2 | 53281551 | T | G | rs11678259 |
| 1092 | 2 | 56532828 | G | C | rs1304898 |
| 1093 | 2 | 57645567 | C | T | rs2612313 |
| 1094 | 2 | 75355062 | T | C | rs4853141 |
| 1095 | 2 | 78710839 | G | A | rs1993146 |
| 1096 | 2 | 81057349 | C | A | rs7597163 |
| 1097 | 2 | 81807528 | C | G | rs4852629 |
| 1098 | 2 | 83395037 | C | T | rs2043015 |
| 1099 | 2 | 83761345 | T | G | rs1115900 |
| 1100 | 2 | 117299195 | T | C | rs1377407 |
| 1101 | 2 | 118347401 | G | A | rs4276037 |
| 1102 | 2 | 123584690 | G | A | rs6709442 |
| 1103 | 2 | 125967099 | T | G | rs6719448 |
| 1104 | 2 | 129702523 | T | G | rs4662980 |
| 1105 | 2 | 133703450 | A | G | rs4305321 |
| 1106 | 2 | 133753999 | G | A | rs1900351 |
| 1107 | 2 | 133771383 | T | C | rs746838 |
| 1108 | 2 | 133826291 | G | C | rs4954082 |
| 1109 | 2 | 133868385 | T | C | rs10173030 |
| 1110 | 2 | 133893655 | G | A | rs12464286 |
| 1111 | 2 | 133896773 | T | G | rs1838883 |
| 1112 | 2 | 137827035 | C | T | rs733196 |
| 1113 | 2 | 142309589 | A | G | rs6429959 |
| 1114 | 2 | 146295728 | G | T | rs2381913 |
| 1115 | 2 | 146707627 | G | A | rs10184858 |
| 1116 | 2 | 150761094 | G | A | rs11893757 |
| 1117 | 2 | 153030496 | T | C | rs12618138 |
| 1118 | 2 | 160616670 | G | C | rs13024212 |
| 1119 | 2 | 180292263 | C | T | rs3845718 |
| 1120 | 2 | 191570538 | G | A | rs4640333 |
| 1121 | 2 | 192471682 | T | C | rs1601323 |
| 1122 | 2 | 192941098 | T | C | rs765278 |
| 1123 | 2 | 193464423 | T | C | rs764142 |
| 1124 | 2 | 195136595 | A | G | rs938065 |
| 1125 | 2 | 220959282 | T | C | rs13021771 |
| 1126 | 2 | 220987575 | A | G | rs2034747 |
| 1127 | 2 | 221759957 | A | G | rs1364386 |
| 1128 | 2 | 225864180 | C | T | rs13013295 |
| 1129 | 2 | 226293522 | A | G | rs1515113 |
| 1130 | 2 | 226466009 | A | T | rs6724846 |
| 1131 | 2 | 235295103 | T | G | rs11901273 |
| 1132 | 20 | 6891490 | C | G | rs6054584 |
| 1133 | 20 | 12711853 | A | G | rs6033500 |
| 1134 | 20 | 40229271 | G | C | rs6028968 |
| 1135 | 20 | 40515646 | T | A | rs6129620 |
| 1136 | 20 | 41854780 | T | C | rs2211350 |
| 1137 | 20 | 41886176 | T | C | rs7265011 |
| 1138 | 20 | 54373070 | C | T | rs6023167 |
| 1139 | 20 | 54963579 | A | G | rs2870375 |
| 1140 | 20 | 60916617 | A | C | rs2426956 |
| 1141 | 21 | 20045854 | A | G | rs8126652 |
| 1142 | 21 | 23594494 | T | C | rs12626525 |
| 1143 | 21 | 26731325 | A | G | rs2187226 |
| 1144 | 3 | 5358553 | G | C | rs4685910 |
| 1145 | 3 | 5378490 | A | G | rs7649517 |
| 1146 | 3 | 5457906 | C | G | rs7649155 |
| 1147 | 3 | 5465019 | A | G | rs6775400 |
| 1148 | 3 | 5534813 | A | G | rs6774182 |
| 1149 | 3 | 5686597 | A | C | rs4685973 |
| 1150 | 3 | 5710199 | G | A | rs6799738 |
| 1151 | 3 | 5782842 | A | G | rs1435352 |
| 1152 | 3 | 16071585 | C | A | rs11711890 |
| 1153 | 3 | 26501472 | A | C | rs7637842 |
| 1154 | 3 | 26862402 | C | T | rs11711747 |
| 1155 | 3 | 30169615 | T | C | rs2371997 |
| 1156 | 3 | 31025960 | C | T | rs294314 |
| 1157 | 3 | 35043475 | T | C | rs713144 |
| 1158 | 3 | 67111680 | C | T | rs7632236 |
| 1159 | 3 | 84204191 | G | A | rs6780104 |
| 1160 | 3 | 87428480 | C | T | rs6551480 |
| 1161 | 3 | 88701707 | T | C | rs6551361 |
| 1162 | 3 | 88734991 | G | A | rs1384774 |
| 1163 | 3 | 89728859 | T | C | rs13062221 |
| 1164 | 3 | 90368610 | T | C | rs9799286 |
| 1165 | 3 | 94247621 | G | A | rs1584929 |
| 1166 | 3 | 94404708 | T | C | rs6810199 |
| 1167 | 3 | 95327126 | C | T | rs1607490 |
| 1168 | 3 | 104192865 | G | C | rs7610885 |
| 1169 | 3 | 104308959 | T | C | rs55714502 |
| 1170 | 3 | 104338639 | A | G | rs7620614 |
| 1171 | 3 | 104863022 | G | A | rs13061652 |
| 1172 | 3 | 104885661 | A | T | rs12632614 |
| 1173 | 3 | 105174140 | A | G | rs16850936 |
| 1174 | 3 | 110255073 | T | C | rs10934026 |
| 1175 | 3 | 135551769 | T | C | rs9289494 |
| 1176 | 3 | 135742813 | G | A | rs9851816 |
| 1177 | 3 | 144663747 | A | C | rs1178938 |
| 1178 | 3 | 144730082 | C | T | rs6440266 |
| 1179 | 3 | 145181942 | G | C | rs7633246 |
| 1180 | 3 | 145237602 | A | G | rs6778538 |
| 1181 | 3 | 145269689 | C | T | rs1596717 |
| 1182 | 3 | 152954990 | G | T | rs6785504 |
| 1183 | 3 | 161929653 | A | C | rs11711859 |
| 1184 | 3 | 162149732 | A | T | rs1397231 |
| 1185 | 3 | 162803551 | G | A | rs13098441 |
| 1186 | 3 | 163845479 | A | C | rs1492782 |
| 1187 | 3 | 189501341 | G | A | rs2014894 |
| 1188 | 3 | 189508343 | C | A | rs16864459 |
| 1189 | 3 | 191019468 | G | A | rs9864904 |
| 1190 | 3 | 191757874 | A | G | rs709110 |
| 1191 | 3 | 191771515 | T | A | rs1066624 |
| 1192 | 3 | 191772184 | T | C | rs1083670 |
| 1193 | 3 | 194947038 | C | T | rs2082377 |
| 1194 | 4 | 10855090 | G | A | rs9991940 |
| 1195 | 4 | 10915291 | T | C | rs12511310 |
| 1196 | 4 | 11051913 | A | G | rs6846243 |
| 1197 | 4 | 12020898 | T | G | rs6448854 |
| 1198 | 4 | 18123104 | T | C | rs6854314 |
| 1199 | 4 | 24281377 | A | G | rs6448255 |
| 1200 | 4 | 24294211 | G | A | rs4697450 |
| 1201 | 4 | 24380505 | G | C | rs2007816 |
| 1202 | 4 | 27718168 | A | G | rs1992981 |
| 1203 | 4 | 30201580 | C | T | rs2613184 |
| 1204 | 4 | 30477251 | G | A | rs4692459 |
| 1205 | 4 | 30567961 | G | A | rs10014617 |
| 1206 | 4 | 31742430 | G | A | rs1157893 |
| 1207 | 4 | 31783076 | T | G | rs988466 |
| 1208 | 4 | 32850196 | A | G | rs7438388 |
| 1209 | 4 | 34866074 | G | A | rs7670648 |
| 1210 | 4 | 35194064 | C | G | rs2170284 |
| 1211 | 4 | 35256888 | T | C | rs4541530 |
| 1212 | 4 | 35347626 | G | C | rs13112950 |
| 1213 | 4 | 35713140 | C | T | rs13126959 |
| 1214 | 4 | 36755075 | T | C | rs12650943 |
| 1215 | 4 | 45636830 | T | C | rs2061231 |
| 1216 | 4 | 45792876 | C | T | rs1389037 |
| 1217 | 4 | 59362799 | G | A | rs1119950 |
| 1218 | 4 | 60139678 | G | T | rs1345046 |
| 1219 | 4 | 60499876 | G | A | rs10780045 |
| 1220 | 4 | 60509271 | C | T | rs2340729 |
| 1221 | 4 | 63631834 | G | C | rs1456847 |
| 1222 | 4 | 63670114 | G | A | rs13103808 |
| 1223 | 4 | 64064605 | A | G | rs1449188 |
| 1224 | 4 | 66735444 | G | A | rs11937537 |
| 1225 | 4 | 67048906 | C | A | rs1425663 |
| 1226 | 4 | 91768524 | G | C | rs7435103 |
| 1227 | 4 | 95982514 | T | C | rs973852 |
| 1228 | 4 | 114389243 | G | C | rs6838486 |
| 1229 | 4 | 124944164 | A | C | rs1021631 |
| 1230 | 4 | 129489522 | A | C | rs643541 |
| 1231 | 4 | 130103316 | T | C | rs1873868 |
| 1232 | 4 | 130198459 | G | T | rs10001806 |
| 1233 | 4 | 133431748 | A | G | rs1032439 |
| 1234 | 4 | 133676682 | C | T | rs2713266 |
| 1235 | 4 | 136672250 | T | C | rs12512934 |
| 1236 | 4 | 141842417 | G | A | rs2099884 |
| 1237 | 4 | 155047285 | C | T | rs17032387 |
| 1238 | 4 | 156146376 | T | C | rs6419277 |
| 1239 | 4 | 156199668 | T | C | rs6536157 |
| 1240 | 4 | 156208487 | A | G | rs10029573 |
| 1241 | 4 | 159982164 | C | T | rs4627809 |
| 1242 | 4 | 160103006 | G | A | rs1612279 |
| 1243 | 4 | 160138722 | T | C | rs13128591 |
| 1244 | 4 | 160385012 | A | G | rs6835941 |
| 1245 | 4 | 178968553 | A | T | rs1982408 |
| 1246 | 4 | 179566153 | T | G | rs2610997 |
| 1247 | 4 | 179661345 | C | T | rs12509486 |
| 1248 | 4 | 179714973 | C | T | rs4425420 |
| 1249 | 4 | 179738934 | C | T | rs2383397 |
| 1250 | 4 | 180861421 | T | C | rs12648100 |
| 1251 | 4 | 180874878 | G | A | rs2140198 |
| 1252 | 4 | 181383720 | G | T | rs4522908 |
| 1253 | 5 | 2364512 | T | C | rs316598 |
| 1254 | 5 | 2453263 | A | G | rs1908159 |
| 1255 | 5 | 3702962 | A | C | rs1039460 |
| 1256 | 5 | 3717886 | T | G | rs1502635 |
| 1257 | 5 | 18396275 | A | C | rs4866100 |
| 1258 | 5 | 19344111 | A | G | rs16886123 |
| 1259 | 5 | 23115159 | A | C | rs2937021 |
| 1260 | 5 | 23155563 | T | G | rs7736091 |
| 1261 | 5 | 26114387 | A | G | rs7721783 |
| 1262 | 5 | 26195022 | C | T | rs4701263 |
| 1263 | 5 | 26250139 | G | A | rs6892024 |
| 1264 | 5 | 26263490 | A | T | rs4521437 |
| 1265 | 5 | 27705900 | A | G | rs11748760 |
| 1266 | 5 | 27766133 | C | T | rs12659895 |
| 1267 | 5 | 30946767 | T | G | rs1276178 |
| 1268 | 5 | 34486721 | G | A | rs10051815 |
| 1269 | 5 | 46128373 | C | T | rs11486611 |
| 1270 | 5 | 46359219 | C | T | rs4975929 |
| 1271 | 5 | 46385222 | T | A | rs12515999 |
| 1272 | 5 | 50161448 | T | C | rs8188203 |
| 1273 | 5 | 50192402 | G | A | rs7293378 |
| 1274 | 5 | 50246086 | G | A | rs11738711 |
| 1275 | 5 | 52409393 | G | A | rs10060810 |
| 1276 | 5 | 63411710 | G | A | rs4235499 |
| 1277 | 5 | 63688050 | G | T | rs13157106 |
| 1278 | 5 | 63747610 | T | C | rs260995 |
| 1279 | 5 | 63779327 | C | T | rs1472695 |
| 1280 | 5 | 63784827 | T | G | rs7706163 |
| 1281 | 5 | 71859118 | A | G | rs6878538 |
| 1282 | 5 | 84623964 | T | C | rs11960020 |
| 1283 | 5 | 84708783 | C | T | rs10462415 |
| 1284 | 5 | 84861350 | G | A | rs13165966 |
| 1285 | 5 | 84865035 | T | C | rs1500619 |
| 1286 | 5 | 99256157 | T | C | rs1116078 |
| 1287 | 5 | 103665396 | T | C | rs11952040 |
| 1288 | 5 | 110023280 | T | C | rs2925117 |
| 1289 | 5 | 119791509 | A | C | rs12521697 |
| 1290 | 5 | 119809068 | C | T | rs6595196 |
| 1291 | 5 | 120900842 | T | C | rs6888945 |
| 1292 | 5 | 123788539 | C | A | rs29614 |
| 1293 | 5 | 123801176 | C | A | rs257142 |
| 1294 | 5 | 123872869 | T | C | rs330683 |
| 1295 | 5 | 123905854 | C | T | rs12189340 |
| 1296 | 5 | 144035178 | C | T | rs316056 |
| 1297 | 5 | 144660842 | T | G | rs10075043 |
| 1298 | 5 | 153366050 | T | A | rs300340 |
| 1299 | 5 | 169401286 | A | C | rs6555860 |
| 1300 | 5 | 169414353 | G | A | rs12522101 |
| 1301 | 5 | 171558836 | T | C | rs7720865 |
| 1302 | 5 | 175157145 | C | T | rs12189524 |
| 1303 | 5 | 175184337 | T | C | rs4336372 |
| 1304 | 6 | 9411740 | A | C | rs2327167 |
| 1305 | 6 | 9492485 | A | C | rs12200413 |
| 1306 | 6 | 9495536 | C | T | rs6905187 |
| 1307 | 6 | 15789879 | G | T | rs220923 |
| 1308 | 6 | 15819154 | C | T | rs382182 |
| 1309 | 6 | 15820194 | C | T | rs522264 |
| 1310 | 6 | 61473996 | C | T | rs9360231 |
| 1311 | 6 | 62712100 | A | G | rs2843106 |
| 1312 | 6 | 62858698 | A | G | rs12524104 |
| 1313 | 6 | 62955241 | G | A | rs4710390 |
| 1314 | 6 | 66333590 | A | G | rs12530173 |
| 1315 | 6 | 66554684 | T | C | rs7752244 |
| 1316 | 6 | 66857061 | C | A | rs4593347 |
| 1317 | 6 | 66995841 | A | G | rs9453960 |
| 1318 | 6 | 76229150 | T | C | rs994107 |
| 1319 | 6 | 77204307 | G | A | rs12206214 |
| 1320 | 6 | 78038636 | G | A | rs9343715 |
| 1321 | 6 | 78342170 | T | C | rs818268 |
| 1322 | 6 | 90853774 | A | C | rs994916 |
| 1323 | 6 | 90952546 | C | T | rs12664234 |
| 1324 | 6 | 94642318 | C | T | rs2493950 |
| 1325 | 6 | 94748599 | G | A | rs794672 |
| 1326 | 6 | 94876989 | C | T | rs197899 |
| 1327 | 6 | 95779949 | C | T | rs4840033 |
| 1328 | 6 | 103139928 | C | T | rs9373682 |
| 1329 | 6 | 112725403 | C | T | rs9384841 |
| 1330 | 6 | 114645435 | G | A | rs9481463 |
| 1331 | 6 | 115107468 | G | A | rs9488534 |
| 1332 | 6 | 115816330 | T | A | rs4113207 |
| 1333 | 6 | 117161819 | G | A | rs9400981 |
| 1334 | 6 | 137357692 | C | T | rs9373188 |
| 1335 | 6 | 137380770 | T | G | rs6913805 |
| 1336 | 6 | 145001237 | A | G | rs946317 |
| 1337 | 6 | 145040854 | A | C | rs1104835 |
| 1338 | 6 | 145045960 | C | A | rs9376894 |
| 1339 | 6 | 145081204 | A | G | rs495269 |
| 1340 | 6 | 145196271 | C | A | rs4896780 |
| 1341 | 6 | 153542928 | G | T | rs1674729 |
| 1342 | 6 | 153547060 | A | C | rs567878 |
| 1343 | 6 | 155760373 | C | T | rs11156041 |
| 1344 | 6 | 164563082 | C | G | rs2019943 |
| 1345 | 7 | 4371578 | G | A | rs10488360 |
| 1346 | 7 | 4393607 | A | G | rs6959971 |
| 1347 | 7 | 9293438 | C | G | rs4720832 |
| 1348 | 7 | 9294891 | T | A | rs4472411 |
| 1349 | 7 | 9369330 | A | G | rs7780856 |
| 1350 | 7 | 24017376 | A | C | rs10233834 |
| 1351 | 7 | 24028724 | T | C | rs11764999 |
| 1352 | 7 | 24030332 | A | G | rs719158 |
| 1353 | 7 | 41266574 | G | A | rs6943312 |
| 1354 | 7 | 41373358 | G | T | rs10251186 |
| 1355 | 7 | 41472141 | A | G | rs273148 |
| 1356 | 7 | 52603462 | A | G | rs10241795 |
| 1357 | 7 | 62559778 | A | G | rs2123573 |
| 1358 | 7 | 67485831 | G | A | rs6953207 |
| 1359 | 7 | 67908536 | T | A | rs4236217 |
| 1360 | 7 | 89645203 | T | C | rs2888705 |
| 1361 | 7 | 109106133 | T | C | rs2691991 |
| 1362 | 7 | 118715021 | G | A | rs6967747 |
| 1363 | 7 | 125751591 | A | G | rs1419607 |
| 1364 | 7 | 126201859 | C | G | rs562415 |
| 1365 | 7 | 145451172 | C | T | rs850362 |
| 1366 | 7 | 145929887 | G | A | rs4314573 |
| 1367 | 7 | 153596114 | G | A | rs4266558 |
| 1368 | 8 | 59287402 | G | C | rs4737540 |
| 1369 | 8 | 75675676 | T | G | rs724436 |
| 1370 | 8 | 92250654 | A | G | rs1444506 |
| 1371 | 8 | 97459973 | C | T | rs499177 |
| 1372 | 8 | 114054058 | C | G | rs10087835 |
| 1373 | 8 | 115087403 | T | A | rs309618 |
| 1374 | 8 | 115158348 | G | A | rs7836816 |
| 1375 | 8 | 115242924 | A | G | rs11996430 |
| 1376 | 8 | 116507424 | C | T | rs4128874 |
| 1377 | 8 | 121489749 | T | C | rs4870766 |
| 1378 | 8 | 137210744 | C | T | rs4481636 |
| 1379 | 8 | 137216529 | T | C | rs4546699 |
| 1380 | 9 | 8172467 | A | G | rs7861009 |
| 1381 | 9 | 8176622 | T | C | rs10733543 |
| 1382 | 9 | 12439164 | C | G | rs1576657 |
| 1383 | 9 | 24722712 | G | C | rs1888992 |
| 1384 | 9 | 25222108 | G | C | rs10966800 |
| 1385 | 9 | 25275215 | A | G | rs10812209 |
| 1386 | 9 | 26414782 | T | C | rs1855980 |
| 1387 | 9 | 27720612 | A | T | rs997638 |
| 1388 | 9 | 28988968 | T | C | rs10968861 |
| 1389 | 9 | 29466037 | G | A | rs2147432 |
| 1390 | 9 | 30078751 | C | G | rs2002954 |
| 1391 | 9 | 31847260 | T | C | rs10970554 |
| 1392 | 9 | 74000474 | A | T | rs2933020 |
| 1393 | 9 | 78848212 | A | G | rs10780262 |
| 1394 | 9 | 80987559 | G | T | rs10780480 |
| 1395 | 9 | 101894652 | T | C | rs823923 |
| 1396 | 9 | 118932967 | G | T | rs4631540 |
| 1397 | 9 | 119675443 | G | C | rs1860670 |
| 1398 | 9 | 119771210 | G | T | rs2781115 |
| 1399 | 9 | 120113376 | T | A | rs1335219 |
| 1400 | 9 | 124147208 | T | A | rs10986245 |

[0259] Using a panel of 482 SNPs and a panel of 918 SNPs discovered from 88 unrelated Korean individuals in Example 2 described above, in the following Examples, kinship was analyzed in a Korean population in 1-chon to 4-chon relationships based on the Korean kinship system.

[0260] As described below, genome was extracted and purified from samples obtained from a Korean population in the 1- to 4-chon relationships to produce good-quality DNA in Example 3, NGS libraries for sequencing were prepared from good-quality DNA in Example 4, and sequencing was performed using the obtained NGS libraries in Example 5. A genome alignment result file was extracted from the data produced by sequencing in Example 6, and in Example 7, based on the SNP marker information obtained in Example 2, IBS (identity by state) testing was performed from the genome alignment result file obtained in Example 6, and coefficients of relatedness were derived to perform a kinship identification analysis.

### Example 3. Sampling, and Methods of DNA Extraction, Purification and Quality Control

[0261] Genome sequencing was performed through the following separate processes: i) amplifying gDNA (genomic DNA) extracted from an oral sample by PCR (polymerase chain reaction); and ii) decoding (sequencing) the genome through NGS (next-generation sequencing) of the amplified DNA. The extracted gDNA was subjected to DNA QC (quality control) and then used to construct NGS libraries, with the objective being to secure a sufficient amount of NGS sequences.

### 3-1: Collection of Oral Samples

[0262] In the present invention, in order to derive SNP markers capable of estimating kinship even in cases where kinship estimation cannot be made by current technology because all immediate family members have died long ago or in massive disasters (that is, when there is no DNA information of parents available), or even when the genetic distance with the surviving family members is distant, the present inventors, under the permission of IRB (Institutional Review Board), collected oral samples (saliva or oral swap) from 90 Korean individuals in 1- to 4-chon relationships based on the Korean kinship system.

[0263] Among the 90 Korean individuals, 40 individuals were composed of 20 families, each containing two members who are within 2-chon relationships based on the Korean kinship system, consisting of brother-brother, sister-sister, and brother-sister, and among those 40 individuals, 8 individuals were consisted of two sets of 4 individuals in a maternal genotype second-degree relationship, in particular, mother-son-daughter-aunt relationship or mother-sisters-aunt relationship. Among the 90 Korean individuals above, 50 individuals were in 1- to 4-chon relationships based on the Korean kinship system.

3-2: gDNA Extraction

[0264] gDNA was extracted from the samples obtained in Example 3-1 by using DNeasy® Blood & Tissue Kit (Qiagen, USA) following the manufacturer's instructions. However, the method of extracting DNA from samples is not necessarily limited to the aforementioned method, and those skilled in the art would appreciate that any method of extracting gDNA known in the art may be used without limitations.

[0265] In particular, after adding 4 mL of PBS (phosphate buffered saline) to 1 mL of a saliva sample, and the resulting mixture was subjected to centrifugation for 5 minutes at 1,800×g. After the centrifugation, the supernatant was removed, and after adding 180 μl of PBS to the pellet, the pellet was resuspended, followed by addition of 20 μl of protease K and 200 μl of buffer AL (lysis buffer), and the resulting mix was thoroughly vortexed. Next, the resulting mix was incubated at 56° C. for 10 minutes before addition of 200 μl of ethanol (96% v/v to 100% v/v), and then the resulting mix was thoroughly mixed.

[0266] In order to isolate DNA from the mixture by attaching the DNA to the column, the mixture was added to a column (DNeasy Mini spin column) and was subjected to centrifugation at 6,000×g for 1 minute, and the flow-through was removed.

[0267] For washing, 500 μl of buffer AW1 (wash buffer) was added to the column and subjected to centrifugation at 6,000×g for 1 minute, and the flow-through was removed. In addition, 500 μl of buffer AW2 (wash buffer) was added to the column and subjected to centrifugation at 20,000×g for 3 minutes, and the flow-through was removed.

[0268] In order to elute DNA from the column, the column was placed in a new 1.5 mL tube and 200 μl of buffer AE (elution buffer) was directly added to the column and incubated at room temperature for 1 minute. Then, by performing centrifugation at 6,000×g for 1 minute, gDNA was obtained.

### 3-3: DNA Purification

[0269] To secure high-quality DNA, DNA clean-up was performed as follows, using AMPure XP bead (Beckman Coulter) and following the manufacturer's instructions. However, the method of DNA clean-up is not necessarily limited thereto and those skilled in the art would appreciate that any DNA clean-up method known in the art may be used without limitations.

[0270] At least 30 minutes before the experiment, magnetic beads were incubated at room temperature and thoroughly mixed before use. Beads in a volume that is 1.8 times the volume of gDNA obtained in Example 3-2 were added to the gDNA and thoroughly mixed by pipetting. Next, the resulting mixture was incubated at room temperature for 5 minutes to allow DNA and the beads to bind together.

[0271] After mild centrifugation, a sample tube was loaded in a magnetic separation rack and left for 2 minutes to 5 minutes to allow magnetic beads and DNA complexes to separate from the mixture. Once the supernatant becomes clear, the supernatant was removed.

[0272] For washing, while the sample tube is loaded in the magnetic separation rack, 200 μl of 80% v/v ethanol was added to the tube and then removed therefrom after 30 seconds. This process was repeated twice. Next, the lid of the tube was opened to let ethanol dry until before a crack forms in the sample.

[0273] The sample tube was taken out of the magnetic separation rack and combined with sterilized deionized water to elute DNA to a desired concentration. In order to separate DNA from the magnetic beads, the sample tube was incubated at room temperature for 5 minutes and reloaded in the magnetic separation rack. Once the supernatant becomes clear, by collecting the supernatant into a new tube, purified DNA was obtained.

### 3-4: DNA QC

[0274] Using a fluorometer (Qubit 4 Fluorometer) by Thermo Fisher Scientific, QC (quality control) was performed on the purified DNA obtained in Example 3-3 above, and as a result, it was confirmed that the extracted DNA was of good quality.

### Example 4. NGS Library Construction for Genome Analysis

[0275] In order to proceed the whole genome sequencing (WGS), good-quality gDNA samples passed the quality control (QC) standards in Example 3 above were used to construct libraries.

### 4-1: DNA Fragmentation and Size Selection

[0276] The good-quality DNA having passed the QC standards in Example 3 above were fragmented into 100 bp to 1000 bp, and were size selected for 300 bp to 500 bp fragments to enable construction of paired-end 150 library using bead. The size of the selected gDNA was confirmed using 2100 Bioanalyzer by Agilent, which is an automated electrophoresis tool for sample QC. In addition, the concentration was measured using Qubit™ dsDNA HS Assay kit (Thermo Fisher Scientific), which is a kit for dsDNA quantification capable of distinguishing double-stranded DNA from other nucleic acids or proteins with high sensitivity.

### 4-2: End Repair and A-Tailing

[0277] DNA fragments having a size of 300 bp to 500 bp selected in Example 4-1 were repaired by blunt ends, and A-tailing, which adds dATP (deoxyadenosine triphosphate) to the 3′ end, was performed.

### 4-3: Adaptor Ligation

[0278] Adaptors tailed with dTTP (deoxythymidine triphosphate) were ligated to ends of the DNA fragments in Example 4-2 above, and treated on a flow cell to be hybridized.

### 4-4: Library QC

[0279] The prepared libraries were checked for quality by using 2100 Bioanalyzer system by Agilent. The QC results confirmed that the libraries prepared from a total of 50 samples, namely, samples NFS_202100101 to NFS_202100116, samples NFS_202100117 to NFS_202100302, samples NFS_202100303 to NFS_202100406, and samples NFS_202100407 to NFS_202100408, were of good quality.

### 4-5: PCR Amplification

[0280] Products ligated with adapters were amplified by PCR. The final PCR products were measured for size by Agilent 2100 Bioanalyzer and were measured for concentration by the Qubit™ dsDNA HS Assay kit, and the amount (mass, ng) in the unit of nanograms that corresponds to 1 pmol (picomole) of the PCR product was calculated.

### 4-6: Single Strand Circularization

[0281] A single-strand molecule formed by heat-denaturing 1 pmol of the PCR product was ligated with a DNA ligase, and the remaining linear molecule was digested with exonuclease. Following the single strand circularization, QC was run and confirmed that the nucleic acids obtained were of good quality.

### Example 5. Method of Producing NGS Sequencing Data Using NGS Platform

[0282] Following the single strand circularization in Example 4-6 above, DNB (DNA nanoball) was prepared as described below, and DNB sequencing was conducted using high density patterned nanoarray flow cells by MGI Tech, which allow only one DNB bound per active site.

### 5-1: Preparation of DNA Nanoball

[0283] 40 fmol (femtomole) of the single-strand circular DNA libraries obtained in Example 4 were hybridized with primers. After 15 minutes of RCA (rolling circle amplification) using DNB Enzyme (Phi29, ϕ29 DNA polymerase), the concentration of the libraries was measured by Qubit™ ssDNA Assay kit.

### 5-2: DNB Pooling Calculations

[0284] The sum of concentration reciprocals of the samples to be pooled, an average value thereof, and Parameter B, which is 400/average value, were calculated to confirm the pooling volume for each sample.

### 5-3: DNB Loading Preparation

[0285] Using DNB Load Buffers I and III from the DNB Rapid Reagent Kit manufactured by MGI Tech., a DNB loading mix was prepared.

### 5-4: Flow Cell Preparation and DNB Loading

[0286] In MGIDL-7 by MGI Tech, flow cells were loaded by reading the barcode of a DNB loader. The DNB loading mix prepared in Example 5-3 above was placed in DNB tube holes and flow cell loading was initiated.

### 5-5: Sequencing

[0287] A sequencing cartridge and a washing cartridge were loaded in a sequencer DNBSEQ-T7 (MGI), which was then made to recognize a flow completed with DNB loading and initiate sequencing.

### 5-6: Sequencing Results

[0288] As shown in Table 3 below, from about 50.9 billion reads (average per subject: 1.018 billion reads) of DNA extracted from 50 individuals, sequences of 7,631 Gbp (giga base pairs, one billion nucleotides) (average per subject: 152.6 Gbp) were obtained.

[0289] As indicated by Phred quality scores in Table 4 below, all of the 50 individuals generated satisfied quality score 30 (030) or higher, confirming that high-quality sequencing data were produced. Phred quality score is a quality index indicating per-base reliability and is a measure of how accurately each sequence is called.

TABLE 3
NGS data output statistics using DNBSEQ-T7

| | Raw reads | | | | |
|---|---|---|---|---|---|
| | | Total | Q20 | Q30 | Average |
| | | bases | rate | rate | depth |
| Sample ID | Total reads | (Gb) | (%) | (%) | (x) |
| NFS_202100101 | 723,482,150 | 108.5 | 96.23 | 88.88 | 35.09 |
| NFS_202100102 | 796,923,086 | 119.5 | 95.47 | 86.25 | 38.65 |
| NFS_202100103 | 787,668,392 | 118.2 | 96.08 | 87.89 | 38.20 |
| NFS_202100104 | 682,420,690 | 102.4 | 96.16 | 88.56 | 33.10 |
| NFS_202100105 | 811,409,290 | 121.7 | 96.04 | 87.84 | 39.35 |
| NFS_202100106 | 818,285,838 | 122.7 | 96.10 | 87.98 | 39.69 |
| NFS_202100107 | 886,499,748 | 133.0 | 96.09 | 88.26 | 43.00 |
| NFS_202100108 | 848,005,100 | 127.2 | 96.25 | 88.59 | 41.13 |
| NFS_202100109 | 788,801,938 | 118.3 | 96.05 | 88.89 | 38.26 |
| NFS_202100110 | 936,842,428 | 140.5 | 96.26 | 88.66 | 45.44 |
| NFS_202100111 | 1,019,239,770 | 152.9 | 96.30 | 88.84 | 49.43 |
| NFS_202100112 | 893,577,410 | 134.0 | 95.51 | 86.53 | 43.34 |
| NFS_202100113 | 754,109,606 | 113.1 | 96.01 | 88.75 | 36.57 |
| NFS_202100114 | 965,425,112 | 144.8 | 96.12 | 88.32 | 46.82 |
| NFS_202100115 | 1,020,370,606 | 153.1 | 96.09 | 88.31 | 49.49 |
| NFS_202100116 | 892,958,634 | 133.9 | 96.03 | 88.12 | 43.31 |
| NFS_202100117 | 1,238,895,246 | 185.8 | 96.43 | 89.53 | 60.09 |
| NFS_202100118 | 1,060,983,826 | 159.1 | 96.19 | 89.07 | 51.46 |
| NFS_202100119 | 968,180,426 | 145.2 | 96.21 | 89.07 | 46.96 |
| NFS_202100120 | 790,678,754 | 118.6 | 95.68 | 88.38 | 38.35 |
| NFS_202100121 | 1,130,400,008 | 169.6 | 95.78 | 88.61 | 54.82 |
| NFS_202100201 | 813,812,158 | 122.1 | 95.95 | 89.22 | 39.47 |
| NFS_202100202 | 818,128,832 | 122.7 | 95.74 | 88.76 | 39.68 |
| NFS_202100203 | 823,461,120 | 123.5 | 95.95 | 89.33 | 39.94 |
| NFS_202100204 | 812,313,488 | 121.8 | 95.99 | 89.41 | 39.40 |
| NFS_202100205 | 1,000,703,726 | 150.1 | 96.05 | 89.24 | 48.53 |
| NFS_202100206 | 1,135,314,014 | 170.3 | 96.21 | 89.84 | 55.06 |
| NFS_202100207 | 1,142,387,172 | 171.4 | 96.07 | 89.35 | 55.41 |
| NFS_202100208 | 1,247,857,738 | 187.2 | 96.24 | 89.65 | 60.52 |
| NFS_202100209 | 1,233,019,906 | 185.0 | 96.33 | 89.69 | 59.80 |
| NFS_202100301 | 985,247,144 | 147.8 | 95.79 | 88.77 | 47.78 |
| NFS_202100302 | 865,518,204 | 129.8 | 96.04 | 89.57 | 41.98 |
| NFS_202100303 | 873,348,834 | 131.0 | 96.02 | 88.92 | 42.36 |
| NFS_202100304 | 1,053,161,592 | 158.0 | 95.95 | 88.85 | 51.08 |
| NFS_202100305 | 1,186,293,470 | 177.9 | 95.89 | 88.75 | 57.54 |
| NFS_202100306 | 1,492,126,138 | 223.8 | 96.05 | 89.06 | 72.37 |
| NFS_202100307 | 851,576,702 | 127.7 | 95.94 | 88.79 | 41.30 |
| NFS_202100308 | 980,949,832 | 147.1 | 95.14 | 86.81 | 47.58 |
| NFS_202100309 | 1,090,140,206 | 163.5 | 95.89 | 88.71 | 52.87 |
| NFS_202100310 | 1,135,750,584 | 170.4 | 95.93 | 88.47 | 55.08 |
| NFS_202100311 | 995,794,578 | 149.4 | 96.00 | 88.81 | 48.30 |
| NFS_202100312 | 922,069,014 | 138.3 | 96.05 | 89.05 | 44.72 |
| NFS_202100401 | 1,176,096,778 | 176.4 | 96.14 | 89.25 | 57.04 |
| NFS_202100402 | 1,068,813,494 | 160.3 | 95.99 | 88.86 | 51.84 |
| NFS_202100403 | 1,427,382,264 | 214.1 | 96.50 | 89.88 | 69.23 |
| NFS_202100404 | 1,240,363,992 | 186.1 | 96.99 | 91.16 | 60.16 |
| NFS_202100405 | 1,020,022,412 | 153.0 | 96.87 | 90.78 | 49.47 |
| NFS_202100406 | 1,688,541,332 | 253.3 | 97.30 | 92.01 | 81.89 |
| NFS_202100407 | 1,401,333,380 | 210.2 | 97.28 | 91.70 | 67.96 |
| NFS_202100408 | 1,579,637,052 | 236.9 | 97.23 | 91.75 | 76.61 |

TABLE 4
Probability of sequencing error according to Phred quality scores

| Phred quality score | Sequencing error rate |
|---|---|
| Q10 | 10% |
| Q20 | 1% |
| Q30 | 0.1% |
| Q40 | 0.01% |

[0290] Produced were not only high-quality sequencing data but also sequences with 49.35-fold (x) average coverage depth with respect to the human reference genome (about 3.09 Gbp). This effectively shows that the entire genome was read about 49 times per subject in each sample. Accurate genome sequencing using NGS data requires the data in a volume that is 30 times greater or more than the entire genome, and the NGS data produced in the present invention was minimum 33.09 times and up to 81.89 times, confirming the accuracy of the NGS data according to the present invention. Depth of coverage refers to the average number of reads for a given nucleotide position in a particular region in the genome, and is generally expressed in the unit of x.

### Example 6. Genome Analysis

### 6-1: Sequencing Raw Data QC

[0291] For quality control of raw data generated by DNBSEQ-T7, base quality distributions were analyzed by FastQC (Andrews, 2010) and as a result, excellent base quality was confirmed.

[0292] By performing adapter trimming and quality filter analysis, sequences with adapter contamination and regions with low-quality in the sequencing data produced by NGS were removed to thereby produce high-quality sequencing data. After the adaptor trimming and quality filter analysis, it was analyzed that the depth of coverage was average 49.1× with respect to clean data. The results thereof are shown in Table 5 below.

TABLE 5
Statistics of clean-read after quality control
of sequences generated by DNBSEQ-T7

| | Clean reads | | | Clean |
|---|---|---|---|---|
| | Total | Q20 | Q30 | read |
| | bases | rate | rate | depth |
| Sample ID | (Gb) | (%) | (%) | (X) |
| NFS_202100101 | 107.7 | 96.69 | 90.10 | 34.84 |
| NFS_202100102 | 119.1 | 96.64 | 89.75 | 38.51 |
| NFS_202100103 | 117.4 | 96.80 | 90.33 | 37.97 |
| NFS_202100104 | 101.7 | 96.72 | 90.10 | 32.87 |
| NFS_202100105 | 121.1 | 96.79 | 90.31 | 39.15 |
| NFS_202100106 | 122.1 | 96.67 | 89.94 | 39.49 |
| NFS_202100107 | 132.6 | 96.79 | 90.22 | 42.86 |
| NFS_202100108 | 126.7 | 96.08 | 88.36 | 40.97 |
| NFS_202100109 | 117.9 | 96.81 | 90.36 | 38.11 |
| NFS_202100110 | 140.1 | 96.78 | 90.24 | 45.30 |
| NFS_202100111 | 152.4 | 96.94 | 90.72 | 49.28 |
| NFS_202100112 | 133.7 | 96.84 | 90.39 | 43.23 |
| NFS_202100113 | 112.7 | 96.65 | 89.96 | 36.43 |
| NFS_202100114 | 144.5 | 96.76 | 90.23 | 46.72 |
| NFS_202100115 | 152.5 | 96.63 | 89.84 | 49.30 |
| NFS_202100116 | 133.4 | 96.69 | 89.88 | 43.13 |
| NFS_202100117 | 185.0 | 96.72 | 90.11 | 59.83 |
| NFS_202100118 | 158.6 | 95.98 | 88.18 | 51.28 |
| NFS_202100119 | 144.5 | 96.34 | 89.52 | 46.71 |
| NFS_202100120 | 118.4 | 95.82 | 87.94 | 38.28 |
| NFS_202100121 | 168.7 | 96.48 | 89.95 | 54.56 |
| NFS_202100201 | 121.7 | 96.47 | 90.00 | 39.33 |
| NFS_202100202 | 122.2 | 96.12 | 88.91 | 39.51 |
| NFS_202100203 | 123.2 | 96.26 | 89.24 | 39.82 |
| NFS_202100204 | 121.2 | 96.36 | 89.59 | 39.18 |
| NFS_202100205 | 149.4 | 95.54 | 87.17 | 48.32 |
| NFS_202100206 | 169.4 | 96.32 | 89.48 | 54.77 |
| NFS_202100207 | 170.3 | 96.34 | 89.50 | 55.05 |
| NFS_202100208 | 186.4 | 96.34 | 89.62 | 60.26 |
| NFS_202100209 | 184.2 | 95.56 | 87.58 | 59.56 |
| NFS_202100301 | 147.1 | 96.83 | 90.94 | 47.55 |
| NFS_202100302 | 129.3 | 96.75 | 90.67 | 41.79 |
| NFS_202100303 | 130.7 | 96.86 | 91.07 | 42.26 |
| NFS_202100304 | 157.4 | 96.72 | 90.67 | 50.89 |
| NFS_202100305 | 177.1 | 95.57 | 87.43 | 57.27 |
| NFS_202100306 | 223.2 | 96.64 | 90.46 | 72.18 |
| NFS_202100307 | 127.4 | 97.20 | 92.23 | 41.18 |
| NFS_202100308 | 146.5 | 96.83 | 91.21 | 47.37 |
| NFS_202100309 | 162.7 | 96.67 | 90.40 | 52.62 |
| NFS_202100310 | 169.8 | 96.26 | 89.16 | 54.92 |
| NFS_202100311 | 148.9 | 96.91 | 91.20 | 48.14 |
| NFS_202100312 | 137.5 | 96.75 | 90.75 | 44.46 |
| NFS_202100401 | 175.4 | 96.71 | 90.63 | 56.71 |
| NFS_202100402 | 159.6 | 96.93 | 91.24 | 51.60 |
| NFS_202100403 | 213.5 | 96.49 | 89.98 | 69.04 |
| NFS_202100404 | 185.6 | 96.68 | 90.58 | 60.01 |
| NFS_202100405 | 152.7 | 96.83 | 90.92 | 49.36 |
| NFS_202100406 | 252.6 | 96.82 | 90.92 | 81.69 |
| NFS_202100407 | 209.6 | 96.78 | 90.82 | 67.77 |
| NFS_202100408 | 236.4 | 96.56 | 90.21 | 76.44 |

[0293] Furthermore, high-quality sequencing data was extracted also from data of 40 individuals previously produced by Nova-Seq (Illumina). The results thereof are shown in Table 6 below.

TABLE 6

| | Clean reads | | | |
|---|---|---|---|---|
| | Total bases | Q20 rate | Q30 rate | Clean read |
| Sample ID | (Gb) | (%) | (%) | depth (X) |
| 01-1 | 141.5 | 98.10 | 94.34 | 45.76 |
| 01-2 | 126.0 | 98.17 | 94.52 | 40.75 |
| 02-1 | 112.0 | 98.26 | 94.85 | 36.23 |
| 02-2 | 112.0 | 98.22 | 94.73 | 36.22 |
| 03-1 | 112.6 | 98.12 | 94.48 | 36.42 |
| 03-2 | 111.4 | 98.22 | 94.78 | 36.02 |
| 04-1 | 113.8 | 98.28 | 94.87 | 36.78 |
| 04-2 | 113.9 | 98.21 | 94.72 | 36.83 |
| 05-1 | 114.6 | 98.10 | 94.43 | 37.04 |
| 05-2 | 112.5 | 98.16 | 94.52 | 36.39 |
| 06-1 | 113.1 | 98.06 | 94.31 | 36.58 |
| 06-2 | 122.2 | 98.22 | 94.77 | 39.50 |
| 07-1 | 116.5 | 98.22 | 94.76 | 37.65 |
| 07-2 | 111.8 | 98.25 | 94.91 | 36.14 |
| 08-1 | 113.8 | 98.30 | 94.90 | 36.81 |
| 08-2 | 170.7 | 97.32 | 92.55 | 55.20 |
| 09-1 | 114.4 | 98.30 | 94.89 | 36.98 |
| 09-2 | 114.9 | 98.19 | 94.67 | 37.14 |
| 10-1 | 114.4 | 98.14 | 94.51 | 36.99 |
| 10-2 | 113.8 | 98.21 | 94.69 | 36.81 |
| 11-1 | 120.3 | 98.17 | 94.63 | 38.90 |
| 11-2 | 114.9 | 98.26 | 94.88 | 37.16 |
| 12-1 | 142.1 | 98.25 | 94.81 | 45.93 |
| 12-2 | 111.7 | 98.19 | 94.71 | 36.11 |
| 13-1 | 113.1 | 98.29 | 94.90 | 36.58 |
| 13-2 | 112.8 | 98.23 | 94.75 | 36.48 |
| 14-1 | 113.0 | 98.18 | 94.65 | 36.55 |
| 14-2 | 112.0 | 98.23 | 94.77 | 36.22 |
| 15-1 | 116.0 | 98.21 | 94.74 | 37.52 |
| 15-2 | 112.9 | 98.05 | 94.36 | 36.50 |
| 16-1 | 113.0 | 97.95 | 94.05 | 36.54 |
| 16-2 | 113.0 | 98.25 | 94.85 | 36.52 |
| 17-1 | 114.1 | 98.25 | 94.78 | 36.88 |
| 17-2 | 132.3 | 96.89 | 91.42 | 42.78 |
| 18-1 | 116.4 | 98.21 | 94.73 | 37.64 |
| 18-2 | 112.1 | 98.25 | 94.85 | 36.24 |
| 19-1 | 115.1 | 98.15 | 94.55 | 37.23 |
| 19-2 | 114.0 | 98.15 | 94.59 | 36.87 |
| 20-1 | 112.5 | 98.09 | 94.38 | 36.36 |
| 20-2 | 112.7 | 98.27 | 94.87 | 36.44 |

### 6-2: Sequence Alignment

[0294] Using clean reads after the quality control, sequence alignment was performed with the human reference genome (hg38, GRCh38) sequence using the Burrows-Wheeler Alignment (BWA) (Li H, 2013) program. The results thereof are shown in Table 7 below.

[0295] As shown in Table 7, an average alignment rate was shown to be 74.8% (alignment rate), and an average duplicate rate was shown to be 6.49%. From the alignment rate and duplicate rate, it is possible to indirectly determine authenticity of 50 individuals being sequenced and whether there is defect in sampling and library preparation.

[0296] Since most of the 50 individuals sequenced in the present invention showed relatively low alignment rates, additional testing was performed for corresponding samples, and this was incorporated in the final statistics calculated. Among those samples, it was determined to use data previously produced by Nova-Seq for two samples (NFS_202100203 and NFS_202100204), there was no additional production with regard to these two samples.

TABLE 7
Statistics of sequence alignment rate of data
generated by DNBSEQ-T7 from 50 individuals

| | Alignment | Properly | Duplicates |
|---|---|---|---|
| Sample ID | rate (%) | aligned rate (%) | rate (%) |
| NFS_202100101 | 83.82 | 82.03 | 5.15 |
| NFS_202100102 | 92.79 | 91.38 | 3.58 |
| NFS_202100103 | 84.42 | 82.83 | 5.31 |
| NFS_202100104 | 93.54 | 91.58 | 6.41 |
| NFS_202100105 | 64.39 | 63.15 | 4.84 |
| NFS_202100106 | 86.56 | 84.75 | 6.48 |
| NFS_202100107 | 80.34 | 78.79 | 4.14 |
| NFS_202100108 | 68.34 | 66.48 | 12.82 |
| NFS_202100109 | 85.1 | 83.17 | 8.17 |
| NFS_202100110 | 79.87 | 78.02 | 8.45 |
| NFS_202100111 | 68.17 | 66.31 | 8.47 |
| NFS_202100112 | 67.15 | 65.87 | 3.87 |
| NFS_202100113 | 81.03 | 78.95 | 8.58 |
| NFS_202100114 | 71.23 | 69.92 | 3.73 |
| NFS_202100115 | 66.38 | 65.17 | 4.16 |
| NFS_202100116 | 72.97 | 71.56 | 3.60 |
| NFS_202100117 | 73.23 | 72.06 | 4.54 |
| NFS_202100118 | 75.80 | 74.34 | 6.10 |
| NFS_202100119 | 86.62 | 84.82 | 4.09 |
| NFS_202100120 | 90.07 | 88.54 | 3.99 |
| NFS_202100121 | 72.54 | 71.33 | 5.04 |
| NFS_202100201 | 84.45 | 82.74 | 4.06 |
| NFS_202100202 | 83.33 | 81.5 | 7.81 |
| NFS_202100203 | 61.13 | 59.57 | 4.77 |
| NFS_202100204 | 85.27 | 83.48 | 6.11 |
| NFS_202100205 | 76.09 | 74.64 | 12.13 |
| NFS_202100206 | 70.05 | 68.8 | 34.29 |
| NFS_202100207 | 71.50 | 70.24 | 12.38 |
| NFS_202100208 | 69.22 | 68.21 | 6.68 |
| NFS_202100209 | 71.86 | 70.68 | 7.28 |
| NFS_202100301 | 74.35 | 73.18 | 4.96 |
| NFS_202100302 | 80.05 | 78.35 | 5.43 |
| NFS_202100303 | 71.02 | 69.59 | 4.97 |
| NFS_202100304 | 70.27 | 68.51 | 6.94 |
| NFS_202100305 | 69.33 | 67.87 | 5.84 |
| NFS_202100306 | 54.22 | 53.52 | 2.77 |
| NFS_202100307 | 70.49 | 69.13 | 5.56 |
| NFS_202100308 | 77.34 | 75.99 | 3.70 |
| NFS_202100309 | 84.70 | 83.34 | 4.47 |
| NFS_202100310 | 77.55 | 76.13 | 3.60 |
| NFS_202100311 | 77.23 | 76.04 | 4.30 |
| NFS_202100312 | 77.53 | 76.14 | 5.19 |
| NFS_202100401 | 57.71 | 56.41 | 5.99 |
| NFS_202100402 | 72.57 | 71.08 | 7.42 |
| NFS_202100403 | 73.26 | 71.93 | 3.22 |
| NFS_202100404 | 67.34 | 65.42 | 3.53 |
| NFS_202100405 | 73.33 | 70.59 | 4.94 |
| NFS_202100406 | 35.16 | 34.55 | 4.81 |
| NFS_202100407 | 55.87 | 54.67 | 5.43 |
| NFS_202100408 | 51.43 | 50.64 | 3.38 |

[0297] Furthermore, as shown in Table 8 below, data of 40 individuals previously generated by Nova-Seq shows an average alignment rate of 95.5%, and an average duplicates rate of 10.9%.

TABLE 8
Statistics of sequence alignment rate statistics
of data generated by Nova-Seq from 40 individuals

| Sample | Alignment | Properly aligned | Duplicates |
|---|---|---|---|
| ID | rate (%) | rate (%) | rate (%) |
| 01-1 | 82.08 | 80.45 | 11.24 |
| 01-2 | 86.74 | 85.17 | 10.6 |
| 02-1 | 98.1 | 95.82 | 10.22 |
| 02-2 | 99.68 | 97.53 | 11.21 |
| 03-1 | 96.14 | 93.86 | 11.58 |
| 03-2 | 98.62 | 94.71 | 10.62 |
| 04-1 | 97.54 | 95.52 | 11.46 |
| 04-2 | 97.98 | 96.01 | 10.47 |
| 05-1 | 93.36 | 91.26 | 10.68 |
| 05-2 | 95.85 | 94.03 | 12.06 |
| 06-1 | 99.01 | 96.89 | 10.84 |
| 06-2 | 91.99 | 87.09 | 10.35 |
| 07-1 | 98.66 | 96.04 | 11.54 |
| 07-2 | 99.53 | 95.3 | 11.36 |
| 08-1 | 91.07 | 89.35 | 11.23 |
| 08-2 | 66.66 | 64.42 | 9.99 |
| 09-1 | 94.55 | 92.96 | 11.09 |
| 09-2 | 99.23 | 96.88 | 10.38 |
| 10-1 | 99.33 | 97.28 | 11.23 |
| 10-2 | 99.17 | 97.41 | 10.56 |
| 11-1 | 99.81 | 97.85 | 12.9 |
| 11-2 | 99.7 | 97.33 | 10.37 |
| 12-1 | 81.8 | 79.61 | 10.58 |
| 12-2 | 98.01 | 95.4 | 10.03 |
| 13-1 | 97.14 | 95.5 | 11.41 |
| 13-2 | 99.43 | 97.44 | 10.25 |
| 14-1 | 99.65 | 97.38 | 11.8 |
| 14-2 | 99.66 | 97.7 | 10.73 |
| 15-1 | 97.98 | 95.56 | 10.76 |
| 15-2 | 99.66 | 96.96 | 10.7 |
| 16-1 | 98.23 | 96.1 | 10.63 |
| 16-2 | 96.29 | 93.35 | 10.74 |
| 17-1 | 91.78 | 89.81 | 11.09 |
| 17-2 | 93.57 | 91.49 | 8.97 |
| 18-1 | 98.7 | 96.66 | 12.6 |
| 18-2 | 99.25 | 96.7 | 10.1 |
| 19-1 | 93.81 | 91.88 | 10.8 |
| 19-2 | 96.12 | 93.68 | 11.05 |
| 20-1 | 98.11 | 96.42 | 11.17 |
| 20-2 | 95.13 | 92.78 | 11.06 |

### 6-3: BAM (Binary Sequence Alignment/Map) File Extraction

[0298] In order to use the result file (BAM format, Binary sequence Alignment/Map format) aligned with the human reference genome sequence, i) 40 individuals produced by Nova-Seq and ii) 48 individuals produced by DNBSEQ-T7 and 2 individuals produced by Nova-Seq were analyzed following the sequence shown in the pipeline schematic diagram shown in FIG. 4.

[0299] A BAM file is a file in the binary version of SAM file, and is a file format that contains alignment results of reads to the reference genome. A SAM file (Sequence Alignment/Map format File) is a TAB-delimited text format consisting of a header part and an alignment part, containing information of sequences mapped onto a particular position in the reference genome. The header part contains information about version, alignments, lengths, etc. and the alignment part contains information such as sequence information and quality information thereof. Mapping is interchangeably used to mean the same as alignment, and refers to the step of estimating a corresponding read's original position in the genome with respect to a reference genome.

### Example 7. Kinship Identification Analysis

[0300] Using the SNP panels of Example 2 described above, kinship estimation analysis was performed from the BAM file obtained as a result of the sequencing in Example 6 described above. As described in Example 2, the present inventors extracted 918 and 482 SNP markers from KoVariome, which is Korean National Standard Reference Variome database generated from 88 unrelated Korean individuals. Whether these SNP markers are useful to estimate Korean kinship among 90 Korean individuals who are in 1- to 4-chon relationships, that is, family members, was demonstrated as follows.

[0301] As shown in Table 9, first degree relatives (first-d-r) are with respect to a subject, any one of parent, brother, sister, sibling and child; second degree relatives (second-d-r) are with respect to a subject, any one of aunt, uncle, paternal aunt, grandfather, grandmother, half-brother, half-sister, and half-sibling; third degree relatives (third-d-r) are first cousins with respect to a subject; and the unrelated are none of the first-d-r, second-d-r, and third-d-r.

TABLE 9

| Distinctions | Relationship |
|---|---|
| First degree | One of parent, brother, sister, sibling, and child |
| relatives | |
| Second degree | One of aunt, uncle, paternal aunt, grandfather, grand- |
| relatives | mother, half-brother, half-sister, or half-sibling |
| Third degree | First cousins |
| relatives | |
| Unrelated | — |

[0302] Using IBS (identity by state) testing, first i) kinships among 40 individuals produced by Nova-Seq were identified, and then ii) kinship among 48 individuals produced by DNBSEQ-T7 and 2 individuals produced by Nova-Seq were identified.

[0303] As shown in Table 10, IBS testing is an analysis method that can estimate whether the respective samples are in a familial relationship, and as a result of IBS testing with respect to a human subject, if the average IBS score is 1, the individual is deemed to be the same individual or monozygotic twin, if the average IBS score is 0.5, the individual is deemed to be in a parent-child relationship or full-siblings relationship, and if the average IBS score is 0.25, the individual is deemed to be within a 3-chon relationship, and if the average IBS score is 0.125, the individual is deemed to be within a 4-chon relationship (Anderson C. A. et al., 2010, Nat Protoc).

TABLE 10

| Based on Korean | | |
|---|---|---|
| Kinship System | Relationship | Average IBS score |
| — | Same individual | 1.0 |
| — | Monozygotic twins | 1.0 (0.5) |
| 1-chon | Parent-child | 0.5 (0.25) |
| 2-chon | Full siblings | 0.5 |
| 3-chon | Half siblings | 0.25 |
| 4-chon | First cousins | 0.125 |
| — | Unrelated | 0 |

### 7-1: IBS Test

[0304] Using Somalier program (Pedersen et al. 2020), which is a tool capable of rapid evaluation of relatedness from sequencing data, IBS testing was computed for a) variations of the 918-SNP panel according to Example 2-1 described above, or b) variations of the 482-SNP panel according to Example 2-2 described above, from the previously extracted BAM file in Example 6 described above, which is i) data of 40 individuals created by Nova-Seq, or ii) data of 48 individuals created by DNBSEQ-T7 and 2 individuals created by Nova-Seq.

[0305] The method of calculating relatedness by IBS testing using Somalier program is described in detail in Pedersen et al. 2020. Somalier program evaluates relatedness between samples by extracting and comparing variant information directly obtained from VCF (variant call format) files or BAM files containing sequence alignments of each sample. Where aligned sequences are evaluated pairwise at a given position, the base aligned at the given position is identified with respect to a given reference base and an alternative base of the variation to be investigated, that is, a base different from the reference base.

[0306] Simply put, by pairwise comparison of two targets, if all of the SNP bases at both alleles are identical, IBS score 2 (identity by state 2) is assigned to the SNP, and if only one of the SNP bases is identical, IBS score 1 is assigned to the SNP, and if the SNP bases are all different, IBS score 0 is assigned to the SNP. Next, an average IBS of all SNPs compared pairwise was calculated.

[0307] Generally in such IBS testing, the average IBS score of about 1 indicates the same individual or monozygotic twin, the average IBS score of about 0.5 indicates first-d-r which is within 2-chon relationships of parent-child or full-siblings, the average IBS score of about 0.25 indicates second-d-r which is 3-chon relationships, the average IBS score of about 0.125 indicates third-d-r which is 4-chon relationships, and the average IBS score of about 0 indicates no relationship or the unrelated.

[0308] Through the Examples described below, it was demonstrated whether it is possible to distinguish individuals who are relatives from those unrelated by using the 918 SNP markers and the 482 SNP markers for kinship identification in Korean according to the present invention, respectively, in an actual Korean population in 1- to 4-chon relationships based on the Korean kinship system, and by calculating average IBS scores between two individuals and dividing the individuals into first-d-r, second-d-r and unrelated groups, or dividing the individuals into first-d-r, second-d-r, third-d-r and unrelated groups.

### 7-2: IBS Testing Using the 918-SNP Panel

7-2-1: Kinship Analysis of Data Generated by Nova-Seq from 40 Individuals

[0309] As shown in Example 7-1 described above, IBS test was computed for variations of the 918 SNP markers according to Example 2-1 described above, from previously extracted BAM files using Somalier program (Pedersen et al. 2020), which is a tool that can rapidly evaluate relatedness from sequencing data. Coefficients of relatedness as produced from IBS testing of 40 individuals produced by Nova-Seq using the 918 SNP markers are shown as a comparison matrix in FIG. 5.

[0310] Table 11 below shows average IBS scores between two individuals and their actual familial relationship, and FIG. 6 shows the average IBS score for each group of rirst-d-r, second-d-r and other groups. As a result, the average IBS score of the first-degree relatives was 0.501 (0.382 to 0.574) and the average IBS score of the second-degree relatives was 0.226 (0.166 to 0.299). Also, the average IBS score of the unrelated individuals (other) was −0.014 (−0.193 to 0.144).

[0311] From the data indicating that there is no overlap between the buffer region of 0.382 to 0.574 in which the average IBS score of first-d-r is located, and the buffer region of 0.166 to 0.299 in which the average IBS score of second-d-r is located, the present inventors demonstrated that when the above-described 918-SNP panel according to Example 2-1 was applied to Korean families consisting of total 40 individuals, it was possible not only to clearly distinguish first-d-r from those unrelated who are not first-d-r, but also to distinguish between first-d-r and second-d-r.

TABLE 11
IBS scores of 40 individuals using the 918-SNP panel

| Sample 1 | Sample 2 | IBS | Degree |
|---|---|---|---|
| 01-1 | 01-2 | 0.50 | First |
| 01-1 | 02-1 | 0.17 | Second |
| 01-1 | 02-2 | 0.51 | First |
| 01-2 | 02-1 | 0.18 | Second |
| 01-2 | 02-2 | 0.50 | First |
| 02-1 | 02-2 | 0.45 | First |
| 03-1 | 03-2 | 0.38 | First |
| 04-1 | 04-2 | 0.55 | First |
| 05-1 | 05-2 | 0.53 | First |
| 06-1 | 06-2 | 0.53 | First |
| 07-1 | 07-2 | 0.57 | First |
| 08-1 | 08-2 | 0.49 | First |
| 09-1 | 09-2 | 0.44 | First |
| 10-1 | 10-2 | 0.53 | First |
| 11-1 | 11-2 | 0.57 | First |
| 11-1 | 14-1 | 0.52 | First |
| 11-1 | 14-2 | 0.52 | First |
| 11-2 | 14-1 | 0.30 | Second |
| 11-2 | 14-2 | 0.26 | Second |
| 12-1 | 12-2 | 0.50 | First |
| 13-1 | 13-2 | 0.57 | First |
| 14-1 | 14-2 | 0.54 | First |
| 15-1 | 15-2 | 0.48 | First |
| 16-1 | 16-2 | 0.47 | First |
| 17-1 | 17-2 | 0.47 | First |
| 18-1 | 18-2 | 0.57 | First |
| 19-1 | 19-2 | 0.39 | First |
| 20-1 | 20-2 | 0.43 | First |

7-2-2: Kinship Analysis of Data Generated by DNBSEQ-T7 from 48 Individuals and Generated by Nova-Seq from 2 Individuals

[0312] Next, the IBS values were calculated using the data of 48 individuals produced from DNBSEQ-T7 and the data of 2 individuals produced by Nova-Seq. Coefficients of relatedness as produced from IBS testing of 50 individuals using the 918-SNP panel are shown as a comparison matrix in FIG. 7.

[0313] Tables 12 to 14 below show the IBS scores between two individuals in the First-d-r, Second-d-r, and Third-d-r relationships, and FIG. 8 shows the average IBS score for each of First-d-r, Second-d-r, Third-d-r, and Other groups. As a result, the average IBS score of the First-d-r was 0.508 (0.413 to 0.635), the average IBS score of the Second-d-r was 0.253 (0.087 to 0.378), and the average IBS score of the Third-d-r was 0.136 (−0.024 to 0.273). Finally, the average IBS score of the unrelated (other) was 0.025 (−0.187 to 0.263).

[0314] From the data indicating that there is no overlap between the buffer region of 0.413 to 0.635 in which the IBS score of first-d-r is located, and the buffer region of 0.087 to 0.378 in which the IBS score of second-d-r is located, the present inventors demonstrated that when the above-described 918-SNP panel according to Example 2-1 was applied to Korean families consisting of total 50 individuals, it was possible not only to clearly distinguish first-d-r from those unrelated who are not first-d-r, but also to distinguish between first-d-r and second-d-r.

TABLE 12
IBS scores of first degree relatives in the results of kinship
analysis by IBS testing in 50 individuals using the 482-SNP panel
Degrees: First degree relatives

| Sample 1 | Sample 2 | IBS |
|---|---|---|
| NFS_202100101 | NFS_202100103 | 0.535 |
| NFS_202100101 | NFS_202100107 | 0.499 |
| NFS_202100101 | NFS_202100112 | 0.52 |
| NFS_202100101 | NFS_202100116 | 0.508 |
| NFS_202100102 | NFS_202100103 | 0.528 |
| NFS_202100102 | NFS_202100107 | 0.47 |
| NFS_202100102 | NFS_202100112 | 0.501 |
| NFS_202100102 | NFS_202100116 | 0.485 |
| NFS_202100103 | NFS_202100105 | 0.492 |
| NFS_202100103 | NFS_202100106 | 0.492 |
| NFS_202100103 | NFS_202100107 | 0.413 |
| NFS_202100103 | NFS_202100112 | 0.635 |
| NFS_202100103 | NFS_202100116 | 0.456 |
| NFS_202100104 | NFS_202100105 | 0.515 |
| NFS_202100104 | NFS_202100106 | 0.475 |
| NFS_202100105 | NFS_202100106 | 0.43 |
| NFS_202100107 | NFS_202100109 | 0.462 |
| NFS_202100107 | NFS_202100110 | 0.496 |
| NFS_202100107 | NFS_202100111 | 0.525 |
| NFS_202100107 | NFS_202100112 | 0.446 |
| NFS_202100107 | NFS_202100116 | 0.558 |
| NFS_202100108 | NFS_202100109 | 0.5 |
| NFS_202100108 | NFS_202100110 | 0.518 |
| NFS_202100108 | NFS_202100111 | 0.523 |
| NFS_202100109 | NFS_202100110 | 0.513 |
| NFS_202100109 | NFS_202100111 | 0.483 |
| NFS_202100110 | NFS_202100111 | 0.585 |
| NFS_202100112 | NFS_202100114 | 0.526 |
| NFS_202100112 | NFS_202100115 | 0.527 |
| NFS_202100112 | NFS_202100116 | 0.449 |
| NFS_202100113 | NFS_202100114 | 0.513 |
| NFS_202100113 | NFS_202100115 | 0.518 |
| NFS_202100114 | NFS_202100115 | 0.549 |
| NFS_202100118 | NFS_202100117 | 0.455 |
| NFS_202100118 | NFS_202100116 | 0.49 |
| NFS_202100119 | NFS_202100121 | 0.446 |
| NFS_202100119 | NFS_202100101 | 0.476 |
| NFS_202100119 | NFS_202100102 | 0.452 |
| NFS_202100119 | NFS_202100103 | 0.495 |
| NFS_202100119 | NFS_202100107 | 0.453 |
| NFS_202100119 | NFS_202100112 | 0.489 |
| NFS_202100119 | NFS_202100116 | 0.485 |
| NFS_202100121 | NFS_202100120 | 0.531 |
| NFS_202100203 | NFS_202100201 | 0.475 |
| NFS_202100203 | NFS_202100202 | 0.47 |
| NFS_202100204 | NFS_202100203 | 0.527 |
| NFS_202100204 | NFS_202100201 | 0.529 |
| NFS_202100204 | NFS_202100202 | 0.508 |
| NFS_202100205 | NFS_202100207 | 0.512 |
| NFS_202100205 | NFS_202100202 | 0.527 |
| NFS_202100206 | NFS_202100207 | 0.46 |
| NFS_202100207 | NFS_202100209 | 0.527 |
| NFS_202100208 | NFS_202100209 | 0.515 |
| NFS_202100301 | NFS_202100304 | 0.513 |
| NFS_202100301 | NFS_202100305 | 0.549 |
| NFS_202100301 | NFS_202100303 | 0.527 |
| NFS_202100302 | NFS_202100303 | 0.511 |
| NFS_202100302 | NFS_202100307 | 0.506 |
| NFS_202100304 | NFS_202100305 | 0.541 |
| NFS_202100304 | NFS_202100302 | 0.511 |
| NFS_202100304 | NFS_202100303 | 0.527 |
| NFS_202100305 | NFS_202100302 | 0.526 |
| NFS_202100305 | NFS_202100303 | 0.527 |
| NFS_202100306 | NFS_202100310 | 0.552 |
| NFS_202100308 | NFS_202100306 | 0.519 |
| NFS_202100308 | NFS_202100310 | 0.548 |
| NFS_202100308 | NFS_202100307 | 0.51 |
| NFS_202100309 | NFS_202100312 | 0.534 |
| NFS_202100310 | NFS_202100307 | 0.506 |
| NFS_202100311 | NFS_202100309 | 0.526 |
| NFS_202100311 | NFS_202100312 | 0.569 |
| NFS_202100311 | NFS_202100310 | 0.563 |
| NFS_202100312 | NFS_202100310 | 0.54 |
| NFS_202100401 | NFS_202100403 | 0.521 |
| NFS_202100401 | NFS_202100404 | 0.531 |
| NFS_202100402 | NFS_202100403 | 0.478 |
| NFS_202100402 | NFS_202100404 | 0.467 |
| NFS_202100403 | NFS_202100404 | 0.442 |
| NFS_202100405 | NFS_202100401 | 0.599 |
| NFS_202100405 | NFS_202100407 | 0.522 |
| NFS_202100405 | NFS_202100408 | 0.519 |
| NFS_202100406 | NFS_202100407 | 0.482 |
| NFS_202100406 | NFS_202100408 | 0.52 |
| NFS_202100407 | NFS_202100408 | 0.521 |

TABLE 13
IBS scores of second degree relatives in the results of kinship
analysis by IBS testing in 50 individuals using the 482-SNP panel
Degree: Second degree relatives

| Sample 1 | Sample 2 | IBS |
|---|---|---|
| NFS_202100101 | NFS_202100105 | 0.206 |
| NFS_202100101 | NFS_202100106 | 0.23 |
| NFS_202100101 | NFS_202100109 | 0.249 |
| NFS_202100101 | NFS_202100110 | 0.326 |
| NFS_202100101 | NFS_202100111 | 0.302 |
| NFS_202100101 | NFS_202100114 | 0.279 |
| NFS_202100101 | NFS_202100115 | 0.309 |
| NFS_202100102 | NFS_202100105 | 0.289 |
| NFS_202100102 | NFS_202100106 | 0.271 |
| NFS_202100102 | NFS_202100109 | 0.208 |
| NFS_202100102 | NFS_202100110 | 0.216 |
| NFS_202100102 | NFS_202100111 | 0.245 |
| NFS_202100102 | NFS_202100114 | 0.183 |
| NFS_202100102 | NFS_202100115 | 0.232 |
| NFS_202100103 | NFS_202100109 | 0.122 |
| NFS_202100103 | NFS_202100110 | 0.281 |
| NFS_202100103 | NFS_202100111 | 0.259 |
| NFS_202100103 | NFS_202100114 | 0.303 |
| NFS_202100103 | NFS_202100115 | 0.367 |
| NFS_202100105 | NFS_202100107 | 0.154 |
| NFS_202100105 | NFS_202100112 | 0.33 |
| NFS_202100105 | NFS_202100116 | 0.175 |
| NFS_202100106 | NFS_202100107 | 0.177 |
| NFS_202100106 | NFS_202100112 | 0.354 |
| NFS_202100106 | NFS_202100116 | 0.216 |
| NFS_202100107 | NFS_202100114 | 0.217 |
| NFS_202100107 | NFS_202100115 | 0.265 |
| NFS_202100109 | NFS_202100112 | 0.232 |
| NFS_202100109 | NFS_202100116 | 0.272 |
| NFS_202100110 | NFS_202100112 | 0.237 |
| NFS_202100110 | NFS_202100116 | 0.309 |
| NFS_202100111 | NFS_202100112 | 0.254 |
| NFS_202100111 | NFS_202100116 | 0.333 |
| NFS_202100114 | NFS_202100116 | 0.205 |
| NFS_202100115 | NFS_202100116 | 0.233 |
| NFS_202100118 | NFS_202100119 | 0.155 |
| NFS_202100118 | NFS_202100101 | 0.194 |
| NFS_202100118 | NFS_202100102 | 0.306 |
| NFS_202100118 | NFS_202100103 | 0.225 |
| NFS_202100118 | NFS_202100107 | 0.272 |
| NFS_202100118 | NFS_202100112 | 0.161 |
| NFS_202100119 | NFS_202100105 | 0.087 |
| NFS_202100119 | NFS_202100106 | 0.21 |
| NFS_202100119 | NFS_202100109 | 0.168 |
| NFS_202100119 | NFS_202100110 | 0.2 |
| NFS_202100119 | NFS_202100111 | 0.237 |
| NFS_202100119 | NFS_202100114 | 0.158 |
| NFS_202100119 | NFS_202100115 | 0.212 |
| NFS_202100121 | NFS_202100101 | 0.292 |
| NFS_202100121 | NFS_202100102 | 0.223 |
| NFS_202100121 | NFS_202100103 | 0.288 |
| NFS_202100121 | NFS_202100107 | 0.223 |
| NFS_202100121 | NFS_202100112 | 0.286 |
| NFS_202100121 | NFS_202100116 | 0.238 |
| NFS_202100203 | NFS_202100205 | 0.214 |
| NFS_202100204 | NFS_202100205 | 0.272 |
| NFS_202100205 | NFS_202100209 | 0.372 |
| NFS_202100206 | NFS_202100209 | 0.199 |
| NFS_202100207 | NFS_202100202 | 0.279 |
| NFS_202100303 | NFS_202100307 | 0.297 |
| NFS_202100304 | NFS_202100307 | 0.256 |
| NFS_202100305 | NFS_202100307 | 0.301 |
| NFS_202100308 | NFS_202100312 | 0.343 |
| NFS_202100308 | NFS_202100302 | 0.27 |
| NFS_202100310 | NFS_202100302 | 0.304 |
| NFS_202100311 | NFS_202100308 | 0.32 |
| NFS_202100311 | NFS_202100306 | 0.304 |
| NFS_202100311 | NFS_202100307 | 0.251 |
| NFS_202100312 | NFS_202100306 | 0.378 |
| NFS_202100312 | NFS_202100307 | 0.211 |
| NFS_202100401 | NFS_202100407 | 0.331 |
| NFS_202100401 | NFS_202100408 | 0.324 |
| NFS_202100405 | NFS_202100403 | 0.289 |
| NFS_202100405 | NFS_202100404 | 0.267 |

TABLE 14
IBS scores of third degree relatives in the results of kinship
analysis by IBS testing in 50 individuals using the 918-SNP panel
Degree: Third degree relatives

| Sample 1 | Sample 2 | IBS | Sample 1 | Sample 2 | IBS |
|---|---|---|---|---|---|
| NFS_202100105 | NFS_202100109 | 0.014 | NFS_202100118 | NFS_202100115 | 0.103 |
| NFS_202100105 | NFS_202100110 | 0.093 | NFS_202100121 | NFS_202100105 | 0.072 |
| NFS_202100105 | NFS_202100111 | 0.083 | NFS_202100121 | NFS_202100106 | 0.108 |
| NFS_202100105 | NFS_202100114 | 0.15 | NFS_202100121 | NFS_202100109 | 0.143 |
| NFS_202100105 | NFS_202100115 | 0.175 | NFS_202100121 | NFS_202100110 | 0.131 |
| NFS_202100106 | NFS_202100109 | −0.024 | NFS_202100121 | NFS_202100111 | 0.137 |
| NFS_202100106 | NFS_202100110 | 0.144 | NFS_202100121 | NFS_202100114 | 0.154 |
| NFS_202100106 | NFS_202100111 | 0.12 | NFS_202100121 | NFS_202100115 | 0.169 |
| NFS_202100106 | NFS_202100114 | 0.143 | NFS_202100203 | NFS_202100207 | 0.119 |
| NFS_202100106 | NFS_202100115 | 0.164 | NFS_202100204 | NFS_202100207 | 0.112 |
| NFS_202100109 | NFS_202100114 | 0.103 | NFS_202100209 | NFS_202100202 | 0.232 |
| NFS_202100109 | NFS_202100115 | 0.114 | NFS_202100304 | NFS_202100308 | 0.151 |
| NFS_202100110 | NFS_202100114 | 0.101 | NFS_202100304 | NFS_202100310 | 0.162 |
| NFS_202100110 | NFS_202100115 | 0.164 | NFS_202100305 | NFS_202100310 | 0.273 |
| NFS_202100111 | NFS_202100114 | 0.173 | NFS_202100308 | NFS_202100305 | 0.247 |
| NFS_202100111 | NFS_202100115 | 0.208 | NFS_202100308 | NFS_202100303 | 0.225 |
| NFS_202100118 | NFS_202100121 | 0.077 | NFS_202100310 | NFS_202100303 | 0.215 |
| NFS_202100118 | NFS_202100105 | 0.069 | NFS_202100311 | NFS_202100302 | 0.167 |
| NFS_202100118 | NFS_202100106 | 0.086 | NFS_202100312 | NFS_202100302 | 0.149 |
| NFS_202100118 | NFS_202100109 | 0.153 | NFS_202100403 | NFS_202100407 | 0.184 |
| NFS_202100118 | NFS_202100110 | 0.18 | NFS_202100403 | NFS_202100408 | 0.192 |
| NFS_202100118 | NFS_202100111 | 0.206 | NFS_202100404 | NFS_202100407 | 0.09 |
| NFS_202100118 | NFS_202100114 | 0.06 | NFS_202100404 | NFS_202100408 | 0.095 |
| NFS_202100118 | NFS_202100114 | 0.06 | NFS_202100118 | NFS_202100115 | 0.103 |

### 7-3: IBS Testing Using the 482-SNP Panel

7-3-1: Kinship Analysis of Data Generated by Nova-Seq from 40 Individuals

[0315] The IBS test was computed for variations of the 482-SNP panel according to Example 2-2 described above, from the BAM files of 40 individuals produced with Nova-Seq using the Somalier program. IBS scores as produced from IBS testing of 40 individuals using the 482-SNP panel are shown as a comparison matrix in FIG. 9.

[0316] Table 15 below shows average IBS scores between two individuals and their actual familial relationship, and FIG. 10 shows the average IBS score for each group of first-d-r, second-d-r and other groups. As a result, the average IBS score of first-d-r was 0.496 (0.340 to 0.620), and the average IBS score of second-d-r was 0.233 (0.175 to 0.309). In addition, the average IBS score of the unrelated (other) was −0.02 (−0.277 to 0.175).

[0317] From the data indicating that there is no overlap between the buffer region of 0.340 to 0.620 in which the coefficient of relatedness of first-d-r is located, and the buffer region of 0.175 to 0.309 in which the coefficient of relatedness of second-d-r is located, the present inventors were able to confirm that when the above-described 482-SNP panel according to Example 2-2 was applied to Korean families consisting of total 40 individuals, it was possible to clearly distinguish first-d-r from the unrelated.

TABLE 15
IBS scores of 40 individuals using 482 SNP markers

| Sample 1 | Sample 2 | IBS | Degree |
|---|---|---|---|
| 01-1 | 01-2 | 0.58 | First |
| 01-1 | 02-1 | 0.17 | Second |
| 01-1 | 02-2 | 0.52 | First |
| 01-2 | 02-1 | 0.2 | Second |
| 01-2 | 02-2 | 0.55 | First |
| 02-1 | 02-2 | 0.35 | First |
| 03-1 | 03-2 | 0.44 | First |
| 04-1 | 04-2 | 0.6 | First |
| 05-1 | 05-2 | 0.53 | First |
| 06-1 | 06-2 | 0.53 | First |
| 07-1 | 07-2 | 0.62 | First |
| 08-1 | 08-2 | 0.47 | First |
| 09-1 | 09-2 | 0.45 | First |
| 10-1 | 10-2 | 0.49 | First |
| 11-1 | 11-2 | 0.59 | First |
| 11-1 | 14-1 | 0.47 | First |
| 11-1 | 14-2 | 0.51 | First |
| 11-2 | 14-1 | 0.25 | Second |
| 11-2 | 14-2 | 0.31 | Second |
| 12-1 | 12-2 | 0.47 | First |
| 13-1 | 13-2 | 0.51 | First |
| 14-1 | 14-2 | 0.57 | First |
| 15-1 | 15-2 | 0.44 | First |
| 16-1 | 16-2 | 0.48 | First |
| 17-1 | 17-2 | 0.48 | First |
| 18-1 | 18-2 | 0.5 | First |
| 19-1 | 19-2 | 0.34 | First |
| 20-1 | 20-2 | 0.41 | First |

7-3-2: Kinship Analysis of Data Generated by DNBSEQ-T7 from 48 Individuals and Generated by Nova-Seq from 2 Individuals

[0318] Next, using the data of 48 individuals generated by DNBSEQ-T7 and the data of 2 individuals generated by Nova-Seq, IBS scores by IBS testing were calculated. IBS scores as produced from IBS testing of 50 individuals using the 482 SNP markers are shown as a comparison matrix in FIG. 11.

[0319] Tables 16 to 19 below show the IBS scores between two individuals in the First-d-r, Second-d-r, and Third-d-r relationships, respectively, and FIG. 12 shows the average IBS score for each of First-d-r, Second-d-r, Third-d-r, and Other groups. As a result, the average IBS score of the First-d-r was 0.509 (0.378 to 0.667), the average IBS score of the Second-d-r was 0.280 (0.087 to 0.414), and the average IBS score of the Third-d-r was 0.139 (−0.096 to 0.270). Finally, the average IBS score between the unrelated (other) was 0.020 (−0.335 to 0.285).

[0320] Although there is a slight overlap between the buffer region of 0.378 to 0.667 in which the IBS scores of first-d-r are located and the buffer region of 0.087 to 0.414 in which the IBS scores of second-d-r are located, the present inventors have confirmed that the 482-SNP panel according to Example 2-2 when used on families of 50 Korean individuals, is useful to obtain information capable of distinguishing, with respect to a subject, individuals who are in first-d-r relationships, individuals who are possibly in first-d-r relationships, or individuals who are highly likely in first-d-r relationships, from the unrelated, that is, individuals who are not in first-d-r relationships, individuals who are not likely in first-d-r relationships, or individuals who are less likely to be in first-d-r relationships.

TABLE 16
IBS score of first degree relatives in kinship analysis results
by IBS testing in 50 individuals using the 482-SNP panel
Degree: First degree relatives

| Sample 1 | Sample 2 | IBS |
|---|---|---|
| NFS_202100101 | NFS_202100103 | 0.494 |
| NFS_202100101 | NFS_202100107 | 0.518 |
| NFS_202100101 | NFS_202100112 | 0.541 |
| NFS_202100101 | NFS_202100116 | 0.491 |
| NFS_202100102 | NFS_202100103 | 0.514 |
| NFS_202100102 | NFS_202100107 | 0.536 |
| NFS_202100102 | NFS_202100112 | 0.494 |
| NFS_202100102 | NFS_202100116 | 0.426 |
| NFS_202100103 | NFS_202100105 | 0.532 |
| NFS_202100103 | NFS_202100106 | 0.459 |
| NFS_202100103 | NFS_202100107 | 0.552 |
| NFS_202100103 | NFS_202100112 | 0.667 |
| NFS_202100103 | NFS_202100116 | 0.421 |
| NFS_202100104 | NFS_202100105 | 0.457 |
| NFS_202100104 | NFS_202100106 | 0.465 |
| NFS_202100105 | NFS_202100106 | 0.509 |
| NFS_202100107 | NFS_202100109 | 0.503 |
| NFS_202100107 | NFS_202100110 | 0.525 |
| NFS_202100107 | NFS_202100111 | 0.561 |
| NFS_202100107 | NFS_202100112 | 0.476 |
| NFS_202100107 | NFS_202100116 | 0.592 |
| NFS_202100108 | NFS_202100109 | 0.497 |
| NFS_202100108 | NFS_202100110 | 0.508 |
| NFS_202100108 | NFS_202100111 | 0.537 |
| NFS_202100109 | NFS_202100110 | 0.398 |
| NFS_202100109 | NFS_202100111 | 0.443 |
| NFS_202100110 | NFS_202100111 | 0.513 |
| NFS_202100112 | NFS_202100114 | 0.551 |
| NFS_202100112 | NFS_202100115 | 0.522 |
| NFS_202100112 | NFS_202100116 | 0.44 |
| NFS_202100113 | NFS_202100114 | 0.516 |
| NFS_202100113 | NFS_202100115 | 0.513 |
| NFS_202100114 | NFS_202100115 | 0.571 |
| NFS_202100118 | NFS_202100117 | 0.513 |
| NFS_202100118 | NFS_202100116 | 0.506 |
| NFS_202100119 | NFS_202100121 | 0.495 |
| NFS_202100119 | NFS_202100101 | 0.49 |
| NFS_202100119 | NFS_202100102 | 0.519 |
| NFS_202100119 | NFS_202100103 | 0.556 |
| NFS_202100119 | NFS_202100107 | 0.563 |
| NFS_202100119 | NFS_202100112 | 0.572 |
| NFS_202100119 | NFS_202100116 | 0.526 |
| NFS_202100121 | NFS_202100120 | 0.523 |
| NFS_202100203 | NFS_202100201 | 0.516 |
| NFS_202100203 | NFS_202100202 | 0.495 |
| NFS_202100204 | NFS_202100203 | 0.493 |
| NFS_202100204 | NFS_202100201 | 0.46 |
| NFS_202100204 | NFS_202100202 | 0.522 |
| NFS_202100205 | NFS_202100207 | 0.573 |
| NFS_202100205 | NFS_202100202 | 0.526 |
| NFS_202100206 | NFS_202100207 | 0.449 |
| NFS_202100207 | NFS_202100209 | 0.509 |
| NFS_202100208 | NFS_202100209 | 0.53 |
| NFS_202100301 | NFS_202100304 | 0.499 |
| NFS_202100301 | NFS_202100305 | 0.525 |
| NFS_202100301 | NFS_202100303 | 0.461 |
| NFS_202100302 | NFS_202100303 | 0.496 |
| NFS_202100302 | NFS_202100307 | 0.592 |
| NFS_202100304 | NFS_202100305 | 0.54 |
| NFS_202100304 | NFS_202100302 | 0.535 |
| NFS_202100304 | NFS_202100303 | 0.464 |
| NFS_202100305 | NFS_202100302 | 0.523 |
| NFS_202100305 | NFS_202100303 | 0.472 |
| NFS_202100306 | NFS_202100310 | 0.482 |
| NFS_202100308 | NFS_202100306 | 0.462 |
| NFS_202100308 | NFS_202100310 | 0.437 |
| NFS_202100308 | NFS_202100307 | 0.437 |
| NFS_202100309 | NFS_202100312 | 0.573 |
| NFS_202100310 | NFS_202100307 | 0.526 |
| NFS_202100311 | NFS_202100309 | 0.59 |
| NFS_202100311 | NFS_202100312 | 0.554 |
| NFS_202100311 | NFS_202100310 | 0.496 |
| NFS_202100312 | NFS_202100310 | 0.538 |
| NFS_202100401 | NFS_202100403 | 0.479 |
| NFS_202100401 | NFS_202100404 | 0.551 |
| NFS_202100402 | NFS_202100403 | 0.545 |
| NFS_202100402 | NFS_202100404 | 0.525 |
| NFS_202100403 | NFS_202100404 | 0.378 |
| NFS_202100405 | NFS_202100401 | 0.619 |
| NFS_202100405 | NFS_202100407 | 0.494 |
| NFS_202100405 | NFS_202100408 | 0.495 |
| NFS_202100406 | NFS_202100407 | 0.469 |
| NFS_202100406 | NFS_202100408 | 0.443 |
| NFS_202100407 | NFS_202100408 | 0.453 |

TABLE 17
IBS scores of second degree relatives in the results of kinship
analysis by IBS testing in 50 individuals using the 482-SNP panel
Degree: Second degree relatives

| Sample 1 | Sample 2 | IBS | Sample 1 | Sample 2 | IBS |
|---|---|---|---|---|---|
| NFS_202100204 | NFS_202100205 | 0.385 | NFS_202100207 | NFS_202100202 | 0.292 |
| NFS_202100203 | NFS_202100205 | 0.356 | NFS_202100101 | NFS_202100105 | 0.278 |
| NFS_202100205 | NFS_202100209 | 0.33 | NFS_202100101 | NFS_202100106 | 0.211 |
| NFS_202100405 | NFS_202100403 | 0.237 | NFS_202100101 | NFS_202100109 | 0.148 |
| NFS_202100405 | NFS_202100404 | 0.284 | NFS_202100101 | NFS_202100110 | 0.156 |
| NFS_202100118 | NFS_202100119 | 0.302 | NFS_202100101 | NFS_202100111 | 0.202 |
| NFS_202100118 | NFS_202100101 | 0.216 | NFS_202100101 | NFS_202100114 | 0.313 |
| NFS_202100118 | NFS_202100102 | 0.36 | NFS_202100101 | NFS_202100115 | 0.333 |
| NFS_202100118 | NFS_202100103 | 0.274 | NFS_202100102 | NFS_202100105 | 0.347 |
| NFS_202100118 | NFS_202100107 | 0.393 | NFS_202100102 | NFS_202100106 | 0.183 |
| NFS_202100118 | NFS_202100112 | 0.291 | NFS_202100102 | NFS_202100109 | 0.113 |
| NFS_202100311 | NFS_202100308 | 0.167 | NFS_202100102 | NFS_202100110 | 0.178 |
| NFS_202100311 | NFS_202100306 | 0.342 | NFS_202100102 | NFS_202100111 | 0.274 |
| NFS_202100311 | NFS_202100307 | 0.256 | NFS_202100102 | NFS_202100114 | 0.273 |
| NFS_202100304 | NFS_202100307 | 0.3 | NFS_202100102 | NFS_202100115 | 0.239 |
| NFS_202100308 | NFS_202100312 | 0.248 | NFS_202100103 | NFS_202100109 | 0.144 |
| NFS_202100308 | NFS_202100302 | 0.216 | NFS_202100103 | NFS_202100110 | 0.242 |
| NFS_202100312 | NFS_202100306 | 0.372 | NFS_202100103 | NFS_202100111 | 0.295 |
| NFS_202100312 | NFS_202100307 | 0.266 | NFS_202100103 | NFS_202100114 | 0.397 |
| NFS_202100401 | NFS_202100407 | 0.294 | NFS_202100103 | NFS_202100115 | 0.355 |
| NFS_202100401 | NFS_202100408 | 0.341 | NFS_202100105 | NFS_202100107 | 0.394 |
| NFS_202100305 | NFS_202100307 | 0.414 | NFS_202100105 | NFS_202100112 | 0.384 |
| NFS_202100310 | NFS_202100302 | 0.301 | NFS_202100105 | NFS_202100116 | 0.284 |
| NFS_202100119 | NFS_202100105 | 0.356 | NFS_202100106 | NFS_202100107 | 0.297 |
| NFS_202100119 | NFS_202100106 | 0.305 | NFS_202100106 | NFS_202100112 | 0.327 |
| NFS_202100119 | NFS_202100109 | 0.169 | NFS_202100106 | NFS_202100116 | 0.231 |
| NFS_202100119 | NFS_202100110 | 0.215 | NFS_202100107 | NFS_202100114 | 0.355 |
| NFS_202100119 | NFS_202100111 | 0.351 | NFS_202100107 | NFS_202100115 | 0.376 |
| NFS_202100119 | NFS_202100114 | 0.303 | NFS_202100109 | NFS_202100112 | 0.087 |
| NFS_202100119 | NFS_202100115 | 0.363 | NFS_202100109 | NFS_202100116 | 0.23 |
| NFS_202100121 | NFS_202100101 | 0.232 | NFS_202100110 | NFS_202100112 | 0.121 |
| NFS_202100121 | NFS_202100102 | 0.29 | NFS_202100110 | NFS_202100116 | 0.245 |
| NFS_202100121 | NFS_202100103 | 0.334 | NFS_202100111 | NFS_202100112 | 0.177 |
| NFS_202100121 | NFS_202100107 | 0.376 | NFS_202100111 | NFS_202100116 | 0.292 |
| NFS_202100121 | NFS_202100112 | 0.343 | NFS_202100114 | NFS_202100116 | 0.308 |
| NFS_202100121 | NFS_202100116 | 0.273 | NFS_202100115 | NFS_202100116 | 0.286 |
| NFS_202100206 | NFS_202100209 | 0.185 | NFS_202100303 | NFS_202100307 | 0.296 |

TABLE 18
IBS scores of third degree relatives in the results of kinship
analysis by IBS testing in 50 individuals using the 482-SNP panel
Degree: Third degree relatives

| Sample 1 | Sample 2 | IBS | Sample 1 | Sample 2 | IBS |
|---|---|---|---|---|---|
| NFS_202100204 | NFS_202100207 | 0.199 | NFS_202100121 | NFS_202100106 | 0.076 |
| NFS_202100203 | NFS_202100207 | 0.257 | NFS_202100121 | NFS_202100109 | 0.044 |
| NFS_202100118 | NFS_202100121 | 0.227 | NFS_202100121 | NFS_202100110 | 0.03 |
| NFS_202100118 | NFS_202100105 | 0.169 | NFS_202100121 | NFS_202100111 | 0.136 |
| NFS_202100118 | NFS_202100106 | 0.11 | NFS_202100121 | NFS_202100114 | 0.226 |
| NFS_202100118 | NFS_202100109 | 0.153 | NFS_202100121 | NFS_202100115 | 0.269 |
| NFS_202100118 | NFS_202100110 | 0.154 | NFS_202100209 | NFS_202100202 | 0.092 |
| NFS_202100118 | NFS_202100111 | 0.202 | NFS_202100105 | NFS_202100109 | 0.044 |
| NFS_202100118 | NFS_202100114 | 0.236 | NFS_202100105 | NFS_202100110 | 0.149 |
| NFS_202100118 | NFS_202100115 | 0.226 | NFS_202100105 | NFS_202100111 | 0.2 |
| NFS_202100311 | NFS_202100302 | 0.169 | NFS_202100105 | NFS_202100114 | 0.27 |
| NFS_202100304 | NFS_202100308 | 0.104 | NFS_202100105 | NFS_202100115 | 0.231 |
| NFS_202100304 | NFS_202100310 | 0.19 | NFS_202100106 | NFS_202100109 | −0.096 |
| NFS_202100308 | NFS_202100305 | 0.114 | NFS_202100106 | NFS_202100110 | 0.096 |
| NFS_202100308 | NFS_202100303 | 0.063 | NFS_202100106 | NFS_202100111 | 0.124 |
| NFS_202100312 | NFS_202100302 | 0.155 | NFS_202100106 | NFS_202100114 | 0.179 |
| NFS_202100403 | NFS_202100407 | 0.054 | NFS_202100106 | NFS_202100115 | 0.205 |
| NFS_202100403 | NFS_202100408 | 0.039 | NFS_202100109 | NFS_202100114 | 0.043 |
| NFS_202100404 | NFS_202100407 | 0.01 | NFS_202100109 | NFS_202100115 | 0.019 |
| NFS_202100404 | NFS_202100408 | 0.062 | NFS_202100110 | NFS_202100114 | 0.125 |
| NFS_202100305 | NFS_202100310 | 0.179 | NFS_202100110 | NFS_202100115 | 0.071 |
| NFS_202100310 | NFS_202100303 | 0.221 | NFS_202100111 | NFS_202100114 | 0.151 |
| NFS_202100121 | NFS_202100105 | 0.232 | NFS_202100111 | NFS_202100115 | 0.163 |
| NFS_202100204 | NFS_202100207 | 0.199 | NFS_202100121 | NFS_202100106 | 0.076 |

### Conclusion

[0321] It was demonstrated that when using the 918-SNP panel and the 482-SNP panel according to the present invention discovered from SNPs of unrelated 88 Korean individuals, in a group of Korean individuals who are in 1- to 4-chon relationships based on the Korean kinship system, by calculating average IBS scores from IBS testing of making pairwise comparison of each base at each SNP between two individuals, individuals who are first-d-r with respect to a subject and individuals who are not first-d-r can be clearly distinguished from the calculated average IBS scores.

[0322] As summarized in Table 19 below, when using the 918-SNP panel according to Example 2-1 of the present invention on the WGS data of 40 individuals produced by Nova-Seq, which is a commercially available sequencing platform, the average IBS score of first-d-r was found to be 0.501 and the average IBS score of second-d-r was found to be 0.226. By using a different marker set, that is, by varying the panel, when the 482-SNP panel according to Example 2-2 was used, the average IBS score of first-d-r was 0.496 and the average IBS score of second-d-r was 0.233.

TABLE 19

| Data generated by Nova-Seq | | |
|---|---|---|
| from 40 individuals | 918-SNP panel | 482-SNP panel |
| Average of coefficients of | | |
| relatedness by IBS testing of | 0.501 | 0.496 |
| first-degree relatives | (0.382 to 0.574) | (0.340 to 0.620) |
| (Buffer region) | | |
| Average of coefficients of | 0.226 | 0.233 |
| relatedness by IBS testing of | (0.166 to 0.299) | (0.175 to 0.309) |
| second-degree relatives | | |
| (Buffer region) | | |
| Average of coefficients of | −0.014 | −0.02 |
| relatedness by IBS testing | (−0.193 to 0.144) | (−0.277 to 0.175) |
| of the unrelated | | |
| (Buffer region) | | |

[0323] Also as summarized in Table 20 below, when the 918-SNP panel according to Example 2-1 was used on the WGS data of 48 individuals produced by DNBSEQ-T7 and the WGS data of 2 individuals produced by Nova-Seq, which are commercially available sequencing platforms, the average IBS score of first-d-r was 0.508 and the average IBS score of second-d-r was 0.253. By using a different marker set, that is, by varying the panel, when the 482-SNP panel according to Example 2-2 was used, the average IBS score of first-d-r was 0.509 and the average IBS score of second-d-r was 0.280.

TABLE 20

| Data generated by DNBSEQ-T7 | | |
|---|---|---|
| from 48 individuals and | | |
| generated by Nova-Seq from | | |
| 2 individuals | 918-SNP panel | 482-SNP panel |
| Average of coefficients of | 0.508 | 0.509 |
| relatedness by IBS testing of | (0.413 to 0.635) | (0.378 to 0.667) |
| first-degree relatives | | |
| (Buffer region) | | |
| Average of coefficients of | 0.253 | 0.280 |
| relatedness by IBS testing of | (0.087 to 0.378) | (0.087 to 0.414) |
| second-degree relatives | | |
| (Buffer region) | | |
| Average of coefficients of | 0.136 | 0.139 |
| relatedness by IBS testing of | (−0.024 to 0.273) | (−0.096 to 0.270) |
| third-degree relatives | | |
| (Buffer region) | | |
| Average of coefficients of | 0.025 | 0.020 |
| relatedness by IBS testing of | (−0.187 to 0.263) | (−0.335 to 0.285) |
| the unrelated (Buffer region) | | |

[0324] More importantly, when using the 918 SNP markers according to the present invention, even when a smaller number of SNPs is checked compared to the prior art methods, and even when no parent information is available, since the buffer regions in which the average IBS score of two individuals in a first-degree relationship is located and the buffer region in which the average IBS score of two individuals in a second-degree relationship is located are clearly separated from each other, that is, the two buffer regions do not overlap but are distinguished from each other, it is possible to clearly distinguish, with respect to a subject, individuals who are in a first-d-r relationship as one of parent, child, brother, sister, and sibling, from individuals who are not in any first-d-r relationship.

[0325] Also, when using the 482 SNP markers according to the present invention, the buffer region in which an average IBS score of two individuals in a first-d-r relationship is located partially overlaps with the buffer region in which an average IBS score of two individuals in a second-d-r relationship is located. Therefore, the use of the 482 SNP markers may be slightly limited in distinguishing individuals in first-d-r relationships with a subject, from individuals who are in second-d-r relationships with the subject, but can be still useful in distinguishing individuals who are in first-d-r relationships with the subject from those who are not in any first-d-r relationships. In the field of forensic science, any evidence indicating that the possibility of two individuals being in a familial relationship cannot be excluded holds significance. Since the 482 SNP markers according to the present invention makes it possible to distinguish individuals in a first-d-r relationship from the unrelated, individuals possibly in a first-d-r relationship from the unrelated, or individuals highly likely in a first-d-r relationship from the unrelated by simple pairwise comparison of only 482 minimum number of SNPs, it is cost-effective and can reduce the time required for kinship identification, and accordingly, the 482 SNP markers according to the present invention are useful in the field of forensic science, legal medicine, or criminal investigation.

[0326] Consequently, the two SNP panels investigated in the present invention for kinship estimation seem to be useful in distinguishing first-d-r individuals from the unrelated individuals. The 918-SNP panel is expected to be able to distinguish first-d-r and second-d-r from each other. However, it is difficult to distinguish between first-d-r and second-d-r by using the 482-SNP panel, and it would be difficult to apply either of the two panels to distinguish third-d-r from the unrelated individuals. It is considered that this limitation could be overcome by increasing the number of SNP markers, such as by simultaneously using both the 918-SNP panel and the 482-SNP panel, or simultaneously using a part of the 482-SNP panel to the entirety of the 918-SNP panel, or simultaneously using a part of the 918-SNP panel to the entirety of the 482-SNP panel.

[0327] Those skilled in the art would appreciate that a part or all of the SNP markers disclosed in the present invention for kinship identification in Korean can be used to clearly distinguish individuals in first-d-r from those who are not first-d-r.

[0328] Accordingly, the present invention provides at least two SNP panels configured by identifying the genetic characteristics of Koreans, and can measure and estimate the genetic distance within a population by comparing the 918-SNP panel and/or the 482-SNP panel, and thus is expected to be useful in forensic investigations.

[0329] In addition, since the SNP panels according to the present invention can process raw data of a large number of individuals simultaneously, in cases where all of immediate family members have died a long ago or in massive disasters and therefore no current technology can analyze kinship, or even when the genetic distance among the surviving family members is distant, the SNP panels according to the present invention can be used to estimate kinship and thus is expected to resolve past affairs.

### REFERENCES

[0330] Anderson, C. A., Pettersson, F. H., Clarke, G. M., Cardon, L. R., Morris, A. P., & Zondervan, K. T. (2010). Data quality control in genetic case-control association studies. Nature protocols, 5(9), 1564-1573.
[0331] Andrews, S. (2010). FastQC: a quality control tool for high throughput sequence data. Cambridge, UK: Babraham Institute.
[0332] Fan H, Chu J Y. (2007). A brief review of short tandem repeat mutation. Genomics Proteomics Bioinformatics. February; 5(1):7-14.
[0333] Li, H. (2013). Aligning sequence reads, clone sequences and assembly contigs with BWA-MEM. arXiv preprint arXiv:1303.3997.
[0334] Ward, L. D., & Kellis, M. (2016). HaploReg v 4: systematic mining of putative causal variants, cell types, regulators and target genes for human complex traits and disease. Nucleic acids research, 44(D1), D877-D881.

[0335] Pedersen, B. S., Bhetariya, P. J., Brown, J., Kravitz, S. N., Marth, G., Jensen, R. L., . . . & Quinlan, A. R. (2020). Somalier: rapid relatedness estimation for cancer and germline studies using efficient genome sketches. Genome medicine, 12(1), 1-9.

1. A composition for kinship identification in Korean, the composition comprising:
1) an agent for amplifying or detecting a single nucleotide polymorphism (SNP) located at position 101 in at least one sequence selected from the group consisting of nucleotide sequences set forth as SEQ ID NO: 1 to SEQ ID NO: 918;
2) an agent for amplifying or detecting a single nucleotide polymorphism (SNP) located at position 101 in at least one sequence selected from the group consisting of nucleotide sequences set forth as SEQ ID NO: 919 to SEQ ID NO: 1400; or
3) an agent for amplifying or detecting a single nucleotide polymorphism (SNP) located at position 101 in at least one sequence selected from the group consisting of nucleotide sequences set forth as SEQ ID NO: 1 to SEQ ID NO: 1400.

2. The composition for kinship identification in Korean of claim 1, wherein the agent is a primer, a probe, or a mixture thereof.

3. The composition for kinship identification in Korean of claim 1, wherein the kinship is any one of relationships selected from the group consisting of parent, child, brother, sister, and sibling, with respect to a subject.

4. A method of identifying a kinship in Korean, the method comprising:
(1) identifying a nucleotide of an SNP located at position 101 in at least one sequence selected from the group consisting of nucleotide sequences set forth as SEQ ID NO: 1 to SEQ ID NO: 918, in samples isolated from two or more individuals whose kinship is to be identified; or
(2) identifying a nucleotide of an SNP located at position 101 in at least one sequence selected from the group consisting of nucleotide sequences set forth as SEQ ID NO: 919 to SEQ ID NO: 1400, in samples isolated from two or more individuals whose kinship is to be identified.

5. The method of claim 4, further comprising:
in case said (1), identifying the nucleotide of the SNP located at position 101 in at least one sequence selected from the group consisting of nucleotide sequences set forth as SEQ ID NO: 919 to SEQ ID NO: 1400; or
in case said (2), identifying the nucleotide of the SNP located at position 101 in at least one sequence selected from the group consisting of nucleotide sequences set forth as SEQ ID NO: 1 to SEQ ID NO: 918.

6. The method of claim 4, wherein the kinship is any one of relationships selected from the group consisting of parent, child, brother, sister, and sibling, with respect to a subject.

7. The method of claim 4, wherein the identifying the nucleotide at an SNP is amplifying or detecting the SNP by using a primer, a probe, or a mixture thereof.

8. The method of claim 7, further comprising, after the identifying the nucleotide at an SNP, making pairwise comparison of each SNP nucleotide in each sample.

9. The method of claim 8, wherein the making pairwise comparison of each SNP nucleotide in each sample comprises:
(a) i) when all nucleotides of the SNP identified from two alleles in two samples being pairwise compared are identical, assigning an IBS (identity by state) score of 2 to the SNP, ii) when only one nucleotide of the SNP is identical between two alleles in two samples being pairwise compared, assigning an IBS score of 1 to the SNP, or iii) when all nucleotides of the SNP identified from two alleles in two samples being pairwise compared are different, assigning an IBS score of 0 to the SNP; and
(b) obtaining an average of IBS scores of all the SNPs compared pairwise.

10. The method of claim 9, when the average of IBS score from the (b) obtaining an average is 0.300 to 0.700, there is provided information indicating that the two individuals from which the two samples pairwise compared were isolated are in any one of kinship selected from the group consisting of parent, child, brother, sister, and sibling; or
when the average of IBS score from the (b) obtaining an average is less than 0.300, there is provided information indicating that the two individuals from which the two samples pairwise compared were isolated are not in any one of kinship selected from the group consisting of parent, child, brother, sister, and sibling.

11. A method of developing an SNP marker for kinship identification, the method comprising extracting, from the human genome database, an SNP characterized by at least one of the following features:
an SNP having a p value of 0.05 or more at Hardy-Weinberg equilibrium (HWE);
an SNP that is not present within a genomic region or within 100 kbp upstream or downstream of the genomic region;
an SNP having a variant allele frequency of 0.3 to 0.7;
an SNP not present in linkage disequilibrium (LD); and
an SNP not present in repeated regions.

12. The method of claim 11, wherein the genomic region is an exon or a coding sequence.

13. The method of claim 11, wherein the method extracts an SNP having a variant allele frequency of 0.4 to 0.6.

The application's sequence listing, which the Patent Office published only in electronic form, follows.

SEQUENCE LISTING (1400 sequences)

SEQ ID NO: 1 - DNA, 201 bp, Homo sapiens
  variation 101: note = n = C or T
  source 1..201: mol_type = genomic DNA
gaggtctactagaaagctctgtgaatcacaaacacagtcaaatagttttatgactgatctaatgcttttgacaggttgctccacagagctgctggactcangagctattgataactgtacttccagaagctaaattcaccagttacacacatttgatagggaacatacttttctctttcttgcttttatattctttttctc

SEQ ID NO: 2 - DNA, 201 bp, Homo sapiens
  variation 101: note = n = A or G
  source 1..201: mol_type = genomic DNA
ttggtgcttggaaccacatgtaaaagtgacccatcaaaattcaggtgtcgaggaggtggctgcagagatgcaggctggtgtttttcctgcagggatggccncgatttggatatttcaaagaaaagagagggggagtccattgagcccagagccctctctgctgtcactgaagctgtcatctcctggtccccaggctggcgg

SEQ ID NO: 3 - DNA, 201 bp, Homo sapiens
  variation 101: note = n = C or T
  source 1..201: mol_type = genomic DNA
tttggaaaaggaactagggatgtcacggttgctctgggtgtccaggatggggtgcatggagtgggagccgggcgggagcagtggcttcttttgagcgttanggtgtcaccagccctgccctctcccttcccataggacccctgtctcggctccctctcctctgacaggttcctagctcggccctccaagaccatcctaggt

SEQ ID NO: 4 - DNA, 201 bp, Homo sapiens
  variation 101: note = n = G or A
  source 1..201: mol_type = genomic DNA
gcaagactttgtcttaaaaacaaacagacaaacaaacaaaaacacagagtcaaagttatgttttcatcaactgcaaagccaagtagagaaagaaaaatgantgcaggagcaaagctgtagagggagaaaaaaacaaaattaattttctgcttttcccaggtaacttcagctgggaattctgattaacatgagtccttagta

SEQ ID NO: 5 - DNA, 201 bp, Homo sapiens
  variation 101: note = n = T or C
  source 1..201: mol_type = genomic DNA
aatttcatgacggtcattgtgttttacccgaatggctaactgatggccttgcatttctgcctgggtccagcagtcccaccactgagttcttcatctgaaanctttccacctccacaaatcattttggataacaagccattttgtaattgccacaaagttcaaagtggagcagacttctctgcagacacaatgccccagtga

SEQ ID NO: 6 - DNA, 201 bp, Homo sapiens
  variation 101: note = n = A or G
  source 1..201: mol_type = genomic DNA
ggaggtccgcacagttagtaggaggcacagctgggactggagcccaggcctccggacccccagttgaaggtttaatctcatgaagccacaaagagtcacanagctctttcacagccatgtgctagccccaccccagaacagaggcccatctccctgagtggtagaggaggcattcccagggagggggaggagagagggaac

SEQ ID NO: 7 - DNA, 201 bp, Homo sapiens
  variation 101: note = n = G or A
  source 1..201: mol_type = genomic DNA
gaggtttggactcggtctgggcaaagcatgattagttcagtgttctgactcatgcaatgatgtcaggaccattgcagggcacataatcaggcactccaganaagaaaaatggccacgattaccagttggagaggaatatttcaaacaccttaagtcaataaggcttaaaactgggggctgtttctcctcctttctcaaggc

SEQ ID NO: 8 - DNA, 201 bp, Homo sapiens
  variation 101: note = n = G or A
  source 1..201: mol_type = genomic DNA
taaagcccttaaatagtatctcacacacagtaagtgccatttaactgttaacatttgctattattgttcccccacatcacctggccaattattatgacccngattgcgtaagtagaaaaatcaggagacaggaaagctatatcttacttatttactttgacaaaaataatttactcattttaatatacaacagggttaata

SEQ ID NO: 9 - DNA, 201 bp, Homo sapiens
  variation 101: note = n = A or C
  source 1..201: mol_type = genomic DNA
aatcaaccacaataaagaacatttaaatttatttctttatggactaaatttcctcaaatatagacaaagccaagaagttggaagcttggtttatttttttntttttaaaatattactttctttcaatttatttttatattggtagatgatgtgagactcattacattttataggcctgaacaaaatcttacaatttcttac

SEQ ID NO: 10 - DNA, 201 bp, Homo sapiens
  variation 101: note = n = T or C
  source 1..201: mol_type = genomic DNA
ttgatcctcatagatgatatcaaagtctgtggtgcttcccactcattatatatcctaagtgcctattctcatcttaatatggttggggcaactgtctttantgcactcctatctcatgcctcttttcctaagccctccccatataaaattgtttcttgctcctcttcggccctttgggaaacacttaactccgtttttact

SEQ ID NO: 11 - DNA, 201 bp, Homo sapiens
  variation 101: note = n = A or G
  source 1..201: mol_type = genomic DNA
aagtacttcatgttcagaacgtggtaacgtatttcagtaagcagtttatttaatgcatgagagtgaatcaaacagtggggaggcattctaattctgaaccnccaaaaactctccaaggtatcaaacataagtagataagcttatgattttctttatatatacttgggcaatgtcatttacaatcacatctcttaatattaa

SEQ ID NO: 12 - DNA, 201 bp, Homo sapiens
  variation 101: note = n = C or T
  source 1..201: mol_type = genomic DNA
tgcacattttttaaatgagaattgctgatgtagtgacaatatactttctactaaaatgaactatttacttattctattcaaataacaacttgattcattgnaaagcattttgaggcttcttcagaatgaaagaatgtggcagctgtaagaattttctccatatacaaaggcatgaattttttccatatacaattgcataat

SEQ ID NO: 13 - DNA, 201 bp, Homo sapiens
  variation 101: note = n = T or G
  source 1..201: mol_type = genomic DNA
tatcaaatatactggaatcagaacttacaagcgaatttttgttttctcactgatttttaagacttctttctttcatagctgtaagttttatattatccatnatgctttagtggtaatatccctaacaaaagttcagcaatatagttccgactcttattagatatttaccctagcattcttttttttttttttttttttttt

SEQ ID NO: 14 - DNA, 201 bp, Homo sapiens
  variation 101: note = n = A or C
  source 1..201: mol_type = genomic DNA
atgaacattttaaggtttttgaaacataatgccaaattgctttccagaaaggttgtatcaatttatgtttctgtcagtagttaatgagaattgctgttttnatttgctttggggtggggttggaactagggattaatagtatcacatttttacagcacttgggaggaaatttttcttccttctctctatgttactctcatg

SEQ ID NO: 15 - DNA, 201 bp, Homo sapiens
  variation 101: note = n = A or G
  source 1..201: mol_type = genomic DNA
aggctttgcttgtagaagatggtagatggcataaaatagagctatccggtaatattttagggcatatttatcctgtattgggaagaaggaggaaaaacagntttgtgtaagatttataatatgtttcaataccttatcttattcttacaacaaaatacgaagtagatgatgtggacattcacatgagaaaaggcaggcatg

SEQ ID NO: 16 - DNA, 201 bp, Homo sapiens
  variation 101: note = n = T or G
  source 1..201: mol_type = genomic DNA
taaagatttgtgcccttcgtcacccactttcttttccttgccttattcacctctgaagattgaaactctgctaggaactagcagtcagactggaaatgccnccaagcctaatagctatgtatgtcagccgcagcaataaaatggttacagcaaccctatgtttctgggaaatgtgtactcagctttaactcaacagcccat

SEQ ID NO: 17 - DNA, 201 bp, Homo sapiens
  variation 101: note = n = A or T
  source 1..201: mol_type = genomic DNA
agggttttatatgacaaacataatatagaaaataagattaacttcaaaggaaaaacacacaaagggattttttgtctctatcagaaataaaaactgtaagngtgaaaatacatagcacaaaacctttgtaatttgtgtgtttgtgtgtaaactattctcaatgaaatacaaatatgatgattaagcatgtcaggttggatt

SEQ ID NO: 18 - DNA, 201 bp, Homo sapiens
  variation 101: note = n = C or T
  source 1..201: mol_type = genomic DNA
tggcatttcactgacatactgcaggctcttgttctacttttttgtgctgctttccacggtccccattacaggctccaagacccaacaactcctgcaaaaantgatagcattttttttgcctgtgaacaatcacttccttatttgaatgacttaaaaaaaatgagcctttggttcttagtgtatggaaaaaaaatttactta

SEQ ID NO: 19 - DNA, 201 bp, Homo sapiens
  variation 101: note = n = C or G
  source 1..201: mol_type = genomic DNA
tatctgcctttcaaggctgctcctaacccacttacccattcacccaagagcagagtccttgggtgaaatgttatacacttaagatatatatcccaagaacnatgacacataggatgttgggttgtataacatatgctgcttccaaatgtagccttggaaaataattttattttttttgagatggaggttctccctgttgcc

SEQ ID NO: 20 - DNA, 201 bp, Homo sapiens
  variation 101: note = n = A or G
  source 1..201: mol_type = genomic DNA
ttgtgctgaaccacaggtaactgaaggtacagaaagtaaaatagtgggtgggggtaactatcccatgtatatcctggcacacatagccctggctacacatngcaatgactcaaggatcaagtccctaactccttttattttatactccagactttctgcctttctaagaatcttgaaaaataagagactgcattttgtttt

SEQ ID NO: 21 - DNA, 201 bp, Homo sapiens
  variation 101: note = n = T or A
  source 1..201: mol_type = genomic DNA
gcaccaggatctcaaaatcagttgttcacacctttcggttacttgaataagaggcaagtggagtggcatgatgccctagaaagacagatgtgcgattacantctgcttacggtgaaactcccaaaggagatcacatgctgacagtactgggagtggtgcttataataagcccttgtttatagttcaatcagagttcaatag

SEQ ID NO: 22 - DNA, 201 bp, Homo sapiens
  variation 101: note = n = G or A
  source 1..201: mol_type = genomic DNA
gtaaactttaagggctagagaaaaaaatatgtgatctgtattgggccctaaaagcttcgtttcataagctttaaaggaaaacactcttaaaaaataattcnatctaatgtctcaaacaagggcaatacatacagcaggttgctttcccactgtagtttctataatgaaaattgtttataacttataaaaaatcgctgtttg

SEQ ID NO: 23 - DNA, 201 bp, Homo sapiens
  variation 101: note = n = A or G
  source 1..201: mol_type = genomic DNA
ctggtgggagcaggttagaaacaggcttgcagccccagcccagatgcctgcatttaggtgatgagcaatattctttgtgtgttttgtcagtcctgagagangcttctttccaaaaataattactctatatttgtagcaggaaaaccttttatcttctgtttaaattcatatcttcatctgtgttatggaagccctgccctc

SEQ ID NO: 24 - DNA, 201 bp, Homo sapiens
  variation 101: note = n =T or G
  source 1..201: mol_type = genomic DNA
tggggggaagatggagatttcttataaaatcatctgaaatcaagcattccgtttttcatactcaaccacaaaccctaaaatttcagcttgcttttacaaangttcttgatttaattttaaagaaaaattttctctaatgaagaagataccttttttcttttctcttctccaaattattggtaagagaagatgccttttagc

SEQ ID NO: 25 - DNA, 201 bp, Homo sapiens
  variation 101: note = n = C or T
  source 1..201: mol_type = genomic DNA
tgtcatgcccaacttttgagatccttagttaatttgtgtagaattaatcattcttcttttgatcttctcaatttagttactattaatgtagatatttttgnctcacacaatctctttcttgctttcatctccaacaatggctctcaacactagctagatgttatactcaccaacagactttctataaaatgacagtgtcca

SEQ ID NO: 26 - DNA, 201 bp, Homo sapiens
  variation 101: note = n = T or C
  source 1..201: mol_type = genomic DNA
tcccagttacactttagaagtcacttgtttggttcaaaaatatgatatgctctttagactgattttacccacattatgatcagtgaaatcatagatgttgncatgccttagaaattaatgggacatgcccaattaataaaagcaggatggaacatttaagaagaggctaagaactggcactctatctacactctaggtaaa

SEQ ID NO: 27 - DNA, 201 bp, Homo sapiens
  variation 101: note = n = A or G
  source 1..201: mol_type = genomic DNA
ataaatgaatggatctctttttttatgtaaaacccaaataattaagaaagaaacaaaataaacatggtatgttgttttattttcttagttttagcaattcntatttttctttataccttaattctgtgaatgggagtaaatgggcactgttgcttcccaaatactcataaggataaaataaatacagcaaagatagtcaaa

SEQ ID NO: 28 - DNA, 201 bp, Homo sapiens
  variation 101: note = n = T or G
  source 1..201: mol_type = genomic DNA
agataaattggagtggagataactcaaaaaggaaattgtactcatgagagaaagcatatataaaacaacattgaagcctttaaagcactatagaaactaanttttgttgtgattctaatataaaataattttactaatctttaaatttaaatttatcttagtccagtgtttcagccttggcactatcaacaatttgggtct

SEQ ID NO: 29 - DNA, 201 bp, Homo sapiens
  variation 101: note = n = G or A
  source 1..201: mol_type = genomic DNA
agttctttattgcttgatgtctaaatgtctaacatctcccaaagcattgtttttgtaacatgtctggattttgctgtagttattgtttcagactgatttancaactattaagcctaactttaaattcataattttatttaattatttctaactatgtctggtgaccctaattatcaaaggaattccaagtttctgctggtg

SEQ ID NO: 30 - DNA, 201 bp, Homo sapiens
  variation 101: note = n = A or T
  source 1..201: mol_type = genomic DNA
atattagagagagaaggcaaaaacagaacagaacaaaacaaaacgcacctattgagctctggttcaaagaatgtcatgcatgctgaaggagaacatctccncatctgagaaatttactttgctagttagtaatgtaaatgagtcttaagctattgcatcaatgtaccatggaggctagattctcatgagaagaaacactaa

SEQ ID NO: 31 - DNA, 201 bp, Homo sapiens
  variation 101: note = n = C or T
  source 1..201: mol_type = genomic DNA
aaaaggcattttatagaataatacattaaaatatataaatataatatacatgtatacaatccttatataaactattatgatcccttaactttactgtagancacatagctgaggcaattagaatgaaatgaggtataagtattggaaaaagggcaaaattgcatactttcaaatttcattatatattagtaaatttggagg

SEQ ID NO: 32 - DNA, 201 bp, Homo sapiens
  variation 101: note = n = G or T
  source 1..201: mol_type = genomic DNA
agatgtggtctcactatgttgcccaggctggacttgaactcccggcctccaagggatcctcttatctcagccttttagtagctagaattacagatgcaganaatttacccatcagtatggaggctcccctactgtggtaccatcatattttagatttctcgtccattctccattgccttagatcattaaaactgcatcctt

SEQ ID NO: 33 - DNA, 201 bp, Homo sapiens
  variation 101: note = n = A or G
  source 1..201: mol_type = genomic DNA
acaccattttagagccaccatatcagccctagattatttatctcgtaactttatgtcaaaagtgaaaaagaagcctaagtttaattaagtcactataatcnaatcaaactgctggtgcccactcacagtgagcagtttcattctctgaggaattcaggctctttccgtcattctagcccacattttagtcactgacatgtt

SEQ ID NO: 34 - DNA, 201 bp, Homo sapiens
  variation 101: note = n = C or T
  source 1..201: mol_type = genomic DNA
aattatacagtcaggagacaatggggaatatttttgaagtgctggggaaaacaaacaaacaaatggttttccaacagttgttctctttttccccactgccngatgtgctttgcttagcctcaaagaggttttctataggaagaagtttttattaacattctggtgttattacttaccttatgaaattatagaaacatcgta

SEQ ID NO: 35 - DNA, 201 bp, Homo sapiens
  variation 101: note = n = T or G
  source 1..201: mol_type = genomic DNA
ttaacaatcctagatacttttaggtttatcatagactcacagaagtttaaacctagacagctaaataggttcttatatattgtctcctataaccacatacnacacatggagatagagatgttcaaaggggctttgtaagactgctgggtgacaggactacaatctgggtctcaattaccagttctttggccatcctattag

SEQ ID NO: 36 - DNA, 201 bp, Homo sapiens
  variation 101: note = n = A or T
  source 1..201: mol_type = genomic DNA
tgaagttttcagtccagatttgtagtgagtgttaaatttaataatttttgaaagagtgagaaattgcagcaaaaggagcaagataattatctggaaacatnaaacaatctgtgtttcttacttttgttatgcaatgtaagtactcttggaaatgcaatctgaggatactgtaacaatttttaaaataagaaaggaggatag

SEQ ID NO: 37 - DNA, 201 bp, Homo sapiens
  variation 101: note = n = A or G
  source 1..201: mol_type = genomic DNA
gcgccaggccagttttttttacctcctaaaatatacctgggctttatatatataggtgatatttatatgtaactatgtattactacagtaagatatttgtncaattgactattttcataaaagttttagataatcagaaattgatcatataatgcaataacagtaaatatattccctccacacctccgtcccccccgcacc

SEQ ID NO: 38 - DNA, 201 bp, Homo sapiens
  variation 101: note = n = C or T
  source 1..201: mol_type = genomic DNA
aacagaaggaggggggcggaggcctgtgtttacagatgagatttaactgctgtaccaggcgtggagactgagaccccgcaaccctgtggcgcctcagtccntcaataacagtattgagtggtcaggttacaataaaccagagaggaaaggtccgcttgcacttttttttttttttttagacacccctcccatccagggtga

SEQ ID NO: 39 - DNA, 201 bp, Homo sapiens
  variation 101: note = n = A or G
  source 1..201: mol_type = genomic DNA
gatttgccagacattacaagataagtaagtgtcaaaacgaagaatcaaacagaaactcagctagcattcctggactttctaacttctggatcatacttacntgtgttttatgaacaattaaccctatttaaggatatcttcattaaacaactgcaaggtattcttcctgtaattttttttaaatgtggttttcaaaagaat

SEQ ID NO: 40 - DNA, 201 bp, Homo sapiens
  variation 101: note = n = A or T
  source 1..201: mol_type = genomic DNA
aaacagaaaatcagaggtgagtatattgcagtggatgtcgtaagtcagcaaagatgagcccattatcacaattgtgcgctagatttgatttatggtttaangacactacaatgtgtacaccttaaatccaaaaatggtacagcattccttcttacatccccaccaccactaccatttcttgcactgaatatatctgaatta

SEQ ID NO: 41 - DNA, 201 bp, Homo sapiens
  variation 101: note = n = A or T
  source 1..201: mol_type = genomic DNA
cagaatggtaaagtttagtttgtattatccagtgttccaagccttttcattagccttagattaaactcaaacttctgtggaaagatacactccagagacancctagtgatataactttccaaaatctataagtgttggataaattcattcatttatccaacagctatttttcaatgcctactatcaatctagtactgctct

SEQ ID NO: 42 - DNA, 201 bp, Homo sapiens
  variation 101: note = n = C or T
  source 1..201: mol_type = genomic DNA
tctgtctttcatagaattttatacccagatactttagttacattgtaaagaacctcccccatcctcatcatatgcaacattttttacaaataatttgtctntccgcttcgcctgaactaaaatattggatctcttctgagatcactctttcttctatgtcatctatagaaggttgctaattttcctgtagcccatggccct

SEQ ID NO: 43 - DNA, 201 bp, Homo sapiens
  variation 101: note = n = A or G
  source 1..201: mol_type = genomic DNA
agatttacccagtgccaggaagagcccacctgtttgtatggctggctgtaactgaatgctcagtgaggtctgttttcttgggataactctgtagaaaccanacaatacctcagcgttgcaaacgggagctcttcacagatgctttttgttctcctgtcactgattttcagatgaatatgcaaataataacaactataaagt

SEQ ID NO: 44 - DNA, 201 bp, Homo sapiens
  variation 101: note = n = G or A
  source 1..201: mol_type = genomic DNA
attttcatttgcactgaagtcaacttagaggcttgtctctctggatttatatcctctgtcttttatttttccctttttcttcagtgttttacctggttgtncttcctctttattttttcctttatctaatcatttcttacagaaatagccttactaccaatggcatccttaaattagctactatatatgaaaatatttaac

SEQ ID NO: 45 - DNA, 201 bp, Homo sapiens
  variation 101: note = n = G or A
  source 1..201: mol_type = genomic DNA
acacacacacacacacacacacacacacacacacacacacacacagacacacacctggttcagatgtttagaatcattaggagaaggaagcatcattgganattaacctctaatttctacagcaggcagagaatattgttacagctgtaaccctatggataggactatgaaaaaaacttgagaacccaactcaggaattat

SEQ ID NO: 46 - DNA, 201 bp, Homo sapiens
  variation 101: note = n = C or A
  source 1..201: mol_type = genomic DNA
tagcttgatatggctgtcaatgccaggggaaaaggacattcgcttctggtttgtggtcctctcttcctttgtgttcctttttttatgttcacttaaaaacngtcttccaattgtaaaagttcttaccatctacttaacaatattttggcctatgaaggtaattttgaaaacatttgacatagcccatatacaatttttgaa

SEQ ID NO: 47 - DNA, 201 bp, Homo sapiens
  variation 101: note = n = G or A
  source 1..201: mol_type = genomic DNA
aggcatcacatactctaaaagaaggagaagccccaagtaactgatgaaagtgtgtggcccagggtctgtcacgctcagctgctcagtgatcatttctgtcngttttctcgaagtggtggaatatgctggtgcctcttgtcagggaaggggcatcacccaaggctgcaggccaggaagaaaaagaatcagaactctgggtgg

SEQ ID NO: 48 - DNA, 201 bp, Homo sapiens; identical to SEQ ID NO: 42
  variation 101: note = n = T or C
  source 1..201: mol_type = genomic DNA

SEQ ID NO: 49 - DNA, 201 bp, Homo sapiens
  variation 101: note = n = T or C
  source 1..201: mol_type = genomic DNA
gaagatagaagtgggaatagtgaaagataaagagacacatagagggaaggcagctaatgcttttatttgaagatatgcagttcccttctacatgtaagtcncttctctgaaaatttcatttctgttctgttttcattgctgaaactcttttaagcaatgccttacttgtgagctagccccaacatatctcctgcacatatt

SEQ ID NO: 50 - DNA, 201 bp, Homo sapiens
  variation 101: note = n = G or A
  source 1..201: mol_type = genomic DNA
tcagatcttagtgcttgtcagctaaaagtaaaccatagtttagcttcacctaatttcccaataagcgttgcagtatatcatgaaacagaaatgaaattaantgctcaggaatttctcatgcaccaaccgcaggctgcagcaggtgctcctcccctcccagcctgcctctggagagttcccttgtggaggttgttatgactt

SEQ ID NO: 51 - DNA, 201 bp, Homo sapiens
  variation 101: note = n = C or A
  source 1..201: mol_type = genomic DNA
gtgaaggagcatccagccccaccctgtccataacgggagattggcgtgcttcccttcgcaggggtggagagagctgcaccccttaatccctggaatgggangacataagagtcaagaagaacgtcaatatcgttaaaggaaaaggaaatataaatttcgaattcatcttctgacggaaatgaaggcagttttctaagtttc

SEQ ID NO: 52 - DNA, 201 bp, Homo sapiens
  variation 101: note = n = G or A
  source 1..201: mol_type = genomic DNA
gaagactctgaaaatgttgtgttcattccttgagattggcggaatgcccatttaacaagtggttttttctccccctctctctttgagaagattctgcctcntgacctgattagattagtgcatttggaaacaaagcttattcaggtctggtaatttagaaaaaaaaaataatagaatagctaaactctaatagtataaaat

SEQ ID NO: 53 - DNA, 201 bp, Homo sapiens
  variation 101: note = n = T or C
  source 1..201: mol_type = genomic DNA
agtgagatgagcttttgcatttactgacagtatcaagtaaatctgtaaagctgaaaattttgagaaattttgaatatgaccaaagataattgtagaaaaantgtcaaccccatacatgattctagcactaagcttagcaaacataaattttaaactttcttccaaactggaaaatatatggttaagaggtttttacattca

SEQ ID NO: 54 - DNA, 201 bp, Homo sapiens
  variation 101: note = n = T or A
  source 1..201: mol_type = genomic DNA
atcgcatgaacataataacttcaagacaatcaagacaaggtgctgatcttctgtggatgcctccctgggaggtgagtattctgaagactaaagcccacacnggtgaaactgattttggtatgaggtgaggcagggcacacagtggattcagatctttaaaagcagacagtgcagaactggtatgacttcagtttggtagaa

SEQ ID NO: 55 - DNA, 201 bp, Homo sapiens
  variation 101: note = n = C or T
  source 1..201: mol_type = genomic DNA
ggtccttcctcctccccaccttctcttttcttttattaaaacctctggagaatgacatggttgccatgtaaatgttcaggaagtggcttccatcctagccncgtgaatgccataggatctctggaggagagggaagagtcagatagaagtcttgaagccatctggggagaaagaaaggcttaccttcccaaatttcagccc

SEQ ID NO: 56 - DNA, 201 bp, Homo sapiens
  variation 101: note = n = C or T
  source 1..201: mol_type = genomic DNA
tccacctttttctcttttcaagttgaaacacagctctgaaatctgtgggagtggcatggaatttggggatgtgggttttcacccttgctgtgaatggaganagattcttcctgtactaactcccacttctcctcagactcttcttcctgacatttcttcctcctccacccagaaagctatggtggttcctcaagggtcact

SEQ ID NO: 57 - DNA, 201 bp, Homo sapiens
  variation 101: note = n = A or G
  source 1..201: mol_type = genomic DNA
gtttttagaaatgcatgtatgctcaccatgtgccacagaacttgagagcaacaggagccggtcttctgttttcaacaacttgtcatgaatgagccacaaantcggtaaatcatgggtgtataattcacatatacctttgtctgtcttttcctaactggcattcgttgagggatttggagttgtctctaaaacatgcgactg

SEQ ID NO: 58 - DNA, 201 bp, Homo sapiens
  variation 101: note = n = G or A
  source 1..201: mol_type = genomic DNA
attggaagtcagaagtttaaagaaagcgggttttctttaattcaactgcagttaactcacaggaaactgtccttccatgctaataaatgcttttgtctctntgatgcccaaaaagtcaacaatggattcagcacagtcaataaaaatagtcaaacttgttattgactaggtataaagcaaacaacttaattggctcattgt

SEQ ID NO: 59 - DNA, 201 bp, Homo sapiens
  variation 101: note = n = C or G
  source 1..201: mol_type = genomic DNA
gattgtgcacatgctaaagggaggggcgggagcagcagtgcgggagatggcatgtcacacacagtcataataatcgagctacatctagccagataacgctntctttgcttacaaatctaggaaataagccagaaacttaccaaagaataggagtgattactgatactgactaactaaaaaaatgtctccttcctcttcgtt

SEQ ID NO: 60 - DNA, 201 bp, Homo sapiens
  variation 101: note = n = T or A
  source 1..201: mol_type = genomic DNA
ccctcgtgctgcagtgagctgtgaagttgcagagttctcaggcacacccactttccctggtgtaggcccctgtaaatgttactattaccagtaacgactancccttcagagttgggggactttcagacatggtatctcacctgagccccacctcacggccttccagccagtgcaaaccaacaacctcctccattctcacat

SEQ ID NO: 61 - DNA, 201 bp, Homo sapiens
  variation 101: note = n = A or C
  source 1..201: mol_type = genomic DNA
gtagaaggcttcacagttctgttaaagtggccctcactgaggtgttgtgctaggaagaaaagaccttgggcataacaaagccacatcccagacagcctgcngcacactcctgttgccagagctggtgactcactatgactatccttgtggtttctgctgggcagctgggctgggccatttaatgttcatcattaattactg

SEQ ID NO: 62 - DNA, 201 bp, Homo sapiens
  variation 101: note = n = A or G
  source 1..201: mol_type = genomic DNA
tttccctctatttttcatgtctttatgtgattaattatgagaaaatttttttatatctttcttgagatttataattttttcttccatggtgtttgatttantgatgaaactttttattaagttttgttaaatttcaaaaaattaatttttatttttagtttatatttttaaactgtattcattactttgatagtattttac

SEQ ID NO: 63 - DNA, 201 bp, Homo sapiens
  variation 101: note = n = A or G
  source 1..201: mol_type = genomic DNA
attccaaggttgtgcataattaaatgatggcaaatgggttctgaattattgtttagtaacaactaaaaaagtgaaaacataaagttggaataaacatgaantaaatgctggatccaaaagttggagaatgggcctggcgaggtggctcacgcctgtaatctcagcacgtcgggaggccgaggcgggcagcacgaggtcagg

SEQ ID NO: 64 - DNA, 201 bp, Homo sapiens
  variation 101: note = n = A or G
  source 1..201: mol_type = genomic DNA
tggcccactaagtcagtgtgtaatgtggaacaagtaaaagcttaggttaagcaagtgaaagtgtgaggtcaatgaagaaacagcctgtttctgtctcattngtaacttatctaaagaaacaagcaaattttcctgagagatcccaggtaatcaataaataaacataactaaaagaacaaataagtaaaataaaaaatgtta

SEQ ID NO: 65 - DNA, 201 bp, Homo sapiens
  variation 101: note = n = A or G
  source 1..201: mol_type = genomic DNA
aacagctactggcagaagaagttcttatgtgactatattataaaatacatactgctttttaattggcaacaagtcctttgctgtgacctgttggaaaaaancactctatatgggaaggggaacaaaattatcaggaaaaacatttaatctcaggaaataacacattcaaaaacgtttacttaaataaattatgtaactatt

SEQ ID NO: 66 - DNA, 201 bp, Homo sapiens
  variation 101: note = n = A or G
  source 1..201: mol_type = genomic DNA
gatgttaggatgatggcaaagctaaatgtgatgtatttatatagtgaggatacctcttaaaatttataatgtgtcagtcagtacactggatgccttatatnttgtaattcatttagatgttttactaccccagtgataaatttcatcctcatagaggttatctgtcaaagtcacacagtcattacctggaaaaatctgaga

SEQ ID NO: 67 - DNA, 201 bp, Homo sapiens
  variation 101: note = n = C or A
  source 1..201: mol_type = genomic DNA
ctggggatttgtagcacatgtgttacaaacacttcttgcctcttgcccaaaacacagtacaaatccaaagtgtgccttatatcactcattcatgcagccantaactacattattgatttttttgactcaaaagacatgcaactattaatgttcatctaccaattataatcaaagaaagaaatgtcaggaaggatagagaag

SEQ ID NO: 68 - DNA, 201 bp, Homo sapiens
  variation 101: note = n = C or A
  source 1..201: mol_type = genomic DNA
gttaatccttatgtttaatgcttccattcatcaaggagttaggttaggcttgagaaaagcatgtctaaaagaaagagctttttagccatcagtaagaacanctttgaagatcctgaatcactgtacaagagggactcctggacaccaaactttcattcctcctgttttacatattttattcttataaatgaaacaacatca

SEQ ID NO: 69 - DNA, 201 bp, Homo sapiens
  variation 101: note = n = A or G
  source 1..201: mol_type = genomic DNA
attggtccatcatttcttattcctgtgtgtccttgagcaatttgagcaccagggttacttgagctctggaaaaagaatggaatgatatcccacagctgganagaaggttcagcggcgcctgcagtgactttctcctctggctcctcggctgtccttctcgtgagtggctctcttggttgctctagagctccttcttcctcc

SEQ ID NO: 70 - DNA, 201 bp, Homo sapiens
  variation 101: note = n = A or G
  source 1..201: mol_type = genomic DNA
atcaaaattgaaaccaatctagcacaactgagcaagtttcataggatagataggaattgacatagatcttggtgaaaaatgatttcaatatgaaaaaatanaaatgtgtctataataacacagaaaggatttaagatatttaaaatagagaaaaggaactgagcactaactcttccaaggcactgagatgcaattcgcaat

SEQ ID NO: 71 - DNA, 201 bp, Homo sapiens
  variation 101: note = n = G or T
  source 1..201: mol_type = genomic DNA
taaaccttgcctacaacccttgaagctgtgcaaaatttgactaatgagacagctaaatgggcaccaggaccttgtaagtcctccgctgccaaatgatgtgnaattactggctctaggagcataagcttcctcagaaccttgaagaaaggctgcctgtgctccaggaggcagagaagcaggatgaacgtgtgcttttaacca

SEQ ID NO: 72 - DNA, 201 bp, Homo sapiens
  variation 101: note = n = C or T
  source 1..201: mol_type = genomic DNA
ctctagggtcagctgaatctgggtgaaattgtaacttttgcaatttgatatttcagtggtttggactagagccagacaggttatttttccaaataggccangtccaggtagttcctgatattttaagcatcatgatgagagtgtcaagtaatatgttacatcctagacttaaaaatctcaataactgcagagcagatgtga

SEQ ID NO: 73 - DNA, 201 bp, Homo sapiens
  variation 101: note = n = A or G
  source 1..201: mol_type = genomic DNA
tgggaatggaagtctggttgcaggaagttgagagttgaatgagatgctgtgcagactgagttaggccacactttgtagaagttctagtgaaaagagaagangaatcttactagagggaacacaacaccagggttttattcttggggtgggggaggaggaaaataacatacctatttatagaatgagtacagaagcttggtg

SEQ ID NO: 74 - DNA, 201 bp, Homo sapiens
  variation 101: note = n = C or G
  source 1..201: mol_type = genomic DNA
aagtgcagagagagcacacaggctgtgcagtgatgttctggagtcggaactgaggccagggagaggcagaagtgagagtttcattatagacaattgggctnagaagaccctgaataaatcttattttacatcactttgcaggcacactttacattgttggctctgcacttcacagcctcaaaatgggattcgatccaggga

SEQ ID NO: 75 - DNA, 201 bp, Homo sapiens
  variation 101: note = n = G or A
  source 1..201: mol_type = genomic DNA
tggaattttgaggctgacccatgcttttcatcactttcagtccgccttccttaaaattggaggcaacagaaggaggagtcaattttcagcacaatcatacnctgaccacatggcctcctggctcccatctctaccttttccactgggggttcaactcctcagtgtggtagttcattaagggggtagcacagtgcctgacac

SEQ ID NO: 76 - DNA, 201 bp, Homo sapiens
  variation 101: note = n = G or A
  source 1..201: mol_type = genomic DNA
atcagtattgcctagttccataaaggaaatactaatagtgggaaatctatgtaggtactcacaagccatcgaataggaatttgtaaaaatgtggacccacnttctggtgatactccttgatccctcagattggtgattgggtggttttcataacccacaaagaacttcatgttcaaccaaaagaggtgcctgcttttctgg

SEQ ID NO: 77 - DNA, 201 bp, Homo sapiens
  variation 101: note = n = T or A
  source 1..201: mol_type = genomic DNA
accccaatcagggcatcagctgtgccaccatcttgtgatactttagttaattggttgaccattctttttccccaaaatgaattgcctctaataagcaagangggctgaaggcagtttttaaactatcaaaaagtgattttcagtcactataagtgttttgctttagaatttaagaaacccttccctgctggcattaatata

SEQ ID NO: 78 - DNA, 201 bp, Homo sapiens
  variation 101: note = n = G or C
  source 1..201: mol_type = genomic DNA
gccgaagtagaattgcgtattaagccagtgtctccatccaggtaagaaagaaagtgggttccatccttgcttcccctgagtagcatgagaccagtctctancatggtgtaaagtcccacagcactaggaccagcgattccactccatcagcattcaattcatctcttcaccagcttcattaatgctcccctgctagggtgt

SEQ ID NO: 79 - DNA, 201 bp, Homo sapiens
  variation 101: note = n = C or T
  source 1..201: mol_type = genomic DNA
ataagactgaagactgttggcgctgtagcatgtgctttctggagttacttaggttcctgacatctgtctgtaggggagccagcagcaccctgtggcgctcnggctctgaagagttgctgacctcagggcctttgattagagaggtccttgcaaagggaagatgtccactctgcttggactacctagctaaaatacttcata

SEQ ID NO: 80 - DNA, 201 bp, Homo sapiens
  variation 101: note = n = A or C
  source 1..201: mol_type = genomic DNA
actgatacatatacttcaacaaatacacatgcacagttatgtgtacacccacaaagaaacattcacccatgcagagagacacacactcacccacccataangacacatatagccacaccaaacatgcacacgcagacacttgtgtgcacactgatacatacatttccccagtcatgctcacacacataggcacaggttcat

SEQ ID NO: 81 - DNA, 201 bp, Homo sapiens
  variation 101: note = n = G or A
  source 1..201: mol_type = genomic DNA
tacacggtattccgcaccatattccacacggtattttgcacaatattccacatggtatttgacgaggtatgcccactgactctgcacaggtcttgaatatngtagtggcctggattatcctgcagtgatcattcactcccgttcctccacccccgctcaggcccatgcactttcctgccccatttatattgggcttggcca

SEQ ID NO: 82 - DNA, 201 bp, Homo sapiens
  variation 101: note = n = C or T
  source 1..201: mol_type = genomic DNA
caagatgagatttgggtggggacacagagccaaaccacatcacctaatattgctgaatgtgggcaatatagaaatgtttggtagctttaggccaggtttanacaagttgtatcaaagcccagttgccaagtctctgacggccaggtggtgtttgcacacacggaaagatttggcaggcaaacagcacaagacacgttgaac

SEQ ID NO: 83 - DNA, 201 bp, Homo sapiens
  variation 101: note = n = C or T
  source 1..201: mol_type = genomic DNA
ctctctgatgggggcctgcaggcagcaaaagccattaggagcaatttgttgtcaccaggcaggcctgctccccctaaactgttatcaatgagcttgtcaangcaaggcctaaccgcctttgttcttttcatctgtttttccctcagaggcctctccggaccctatggccttctcagaggagctgcaacaggctgttgtaca

SEQ ID NO: 84 - DNA, 201 bp, Homo sapiens
  variation 101: note = n = C or T
  source 1..201: mol_type = genomic DNA
ccatgctctgttgcctgggtctctagtttgtgacctgatgtctgtcactgaggcatctcctggggtttccccttctgagaagggggctgttggcaccatcnaacaaaaggcaatgtgatctttcagaggccctggtgcacgaagctggccctcctgccttcatgccatctttaggtgtgtccagcctgaatatgtagctta

SEQ ID NO: 85 - DNA, 201 bp, Homo sapiens
  variation 101: note = n = C or T
  source 1..201: mol_type = genomic DNA
cacagggcctggtactggacacaaaggaagaaactgaaaaagtacttattctagagaaagcattcagactgtgggcccacttgcttcaatgacaggcaagnatgaagtcctccattgcgtgtcgtgattcctaacctcaaagaaaggttgacttttggagctcaatgttaaaggctaagtagatttgagaatccagatggg

SEQ ID NO: 86 - DNA, 201 bp, Homo sapiens
  variation 101: note = n = G or C
  source 1..201: mol_type = genomic DNA
ggctgtgtgccaataaaactttatttacaaagacagagggccagattcgatgtgcacactgtcatttgctaactcctgatttagtacgttattcctactantaccacccccacctcctagataccagtttggaaactgttttgccaggggccctgggctagtcttggtcagcataaatcctgctgcctggggcattttaac

SEQ ID NO: 87 - DNA, 201 bp, Homo sapiens
  variation 101: note = n = T or C
  source 1..201: mol_type = genomic DNA
tatttacaaagacagagggccagattcgatgtgcacactgtcatttgctaactcctgatttagtacgttattcctactagtaccacccccacctcctaganaccagtttggaaactgttttgccaggggccctgggctagtcttggtcagcataaatcctgctgcctggggcattttaactgttcgcagagatcaaggtcc

SEQ ID NO: 88 - DNA, 201 bp, Homo sapiens
  variation 101: note = n = A or G
  source 1..201: mol_type = genomic DNA
gttcatgaccaagggttaagttgctcattttgacaaaagagggaagccattgtatgtgtggctggtggggtgggggcacacacctgcacctgctatccagnaaccccagactgatggatttttattttggaagcattgcatcaaccaggagagaagaccacttgggggagtgggaccctgagccgaggtgatccttggcca

SEQ ID NO: 89 - DNA, 201 bp, Homo sapiens
  variation 101: note = n = A or G
  source 1..201: mol_type = genomic DNA
ctctcagcaccgtcctcccagctgggatatctcagtgtccctgtcttccaagaccaggtggtggaaacgggaaattgcgttgcattgattattttcagcgnaagagtttgcaatttccatctagcatgggaaacatttttttcatgctctttaaggaaaagacaagatttatgacagatcagaattattattattattatt

SEQ ID NO: 90 - DNA, 201 bp, Homo sapiens
  variation 101: note = n = A or G
  source 1..201: mol_type = genomic DNA
ttgatgaacttgattcctctgcttccgcctgagaggcctggagccaggattgagagaaccagctgagaaaggcagaatcaaccagtaggagcaaatggcangattttgttgttggaccgggagggaggaagcagaaagagaagaggcaagagtggaggctcaaaccatagtttgggaggcctgggtctgagctgtgagaat

SEQ ID NO: 91 - DNA, 201 bp, Homo sapiens
  variation 101: note = n = A or G
  source 1..201: mol_type = genomic DNA
cccactcacggccttctgctcctggtgaaattagcaacagaagatgcaagaggagggaggcaaagggctctcccaagagggggagaattattgcaaaggangaaggaacaggctgaacagacccagggaacaagccagcacatgagcgtgtgccactggagatggtcctgataggggagaagggggcaggatgtacaagtc

SEQ ID NO: 92 - DNA, 201 bp, Homo sapiens
  variation 101: note = n = C or G
  source 1..201: mol_type = genomic DNA
tcacaatccacccagtgcccacactgatccccatgtggaagctggggacccagcattaggtgacctccattgatggcatcatgtgtatggaggtgacatgntgccttattggtctccagggtcctgggctctctggctgactcttgagccacctattgagccaaattcagggtaagccagttctatagaatagaatcttcc

SEQ ID NO: 93 - DNA, 201 bp, Homo sapiens
  variation 101: note = n = C or T
  source 1..201: mol_type = genomic DNA
tcttgtcctctggttccagttactcatggtactcctccaaccccatgaggcctggctcgtgtattaataactattgtagaaaagtgtccaagtctcttacnttctctggtttctgttttagagatgatacaaggaaatataacactctggatcacttcatcttacccaaagcaagaacatcttaaaggatttagatactga

SEQ ID NO: 94 - DNA, 201 bp, Homo sapiens
  variation 101: note = n = A or G
  source 1..201: mol_type = genomic DNA
gagaaggaggcctatgcggagaggaaatctatatgtgtgggccaagggatggccagggtgctaatgtcagcattgcacttctaggactaagctttggttcnctgacaggatggaggagctgaaactaacacttatagattcaggctgagactctggggccaggctaaaatttgtccaagtcagtggtggttcatggttccc

SEQ ID NO: 95 - DNA, 201 bp, Homo sapiens
  variation 101: note = n = C or T
  source 1..201: mol_type = genomic DNA
tgccgggctgcgtgcagagcatcatacttaggatcaaattattgcccccaaagagtcgtttttcttcacccctggtggcatgcttcttggaagcggggagngaaggggttcctgcagtgactaacaaaatagattatggagacagccacttatcttatttgtcatctcgccaaagaaaggctgctctgatgttccaaaaaa

SEQ ID NO: 96 - DNA, 201 bp, Homo sapiens
  variation 101: note = n = T or C
  source 1..201: mol_type = genomic DNA
actcacggagtccaactgtataactatgagattaaattagccatttatggatttcagaaagaaaggagactaaaatgttttatagtgtagttaaaaaaaancattgaatgagtccctcatgttgaacatttcctcatgtcagaagcagggtggatgacacagaaaccataaatccaattgataagtgttaaaatcacttta

SEQ ID NO: 97 - DNA, 201 bp, Homo sapiens
  variation 101: note = n = A or G
  source 1..201: mol_type = genomic DNA
ccagcaatgataaccagttagctcacgaacaaaggaagaacagtggctccttacccctgtgccggtgcatacagactctatgggcaaccacattctcctgnaatccctacttcactttccttctttttcactagactctgagccaactgccagttgtattatggtttcagagcccagcacagagcatgtcacccaaataat

SEQ ID NO: 98 - DNA, 201 bp, Homo sapiens
  variation 101: note = n = A or G
  source 1..201: mol_type = genomic DNA
gctttgctgctttgctctgtgggagccgcgaagggaaggctccagggcctgagtgaagggtgcggaatggcccatgaggggtcccatggggagtccacaangggtgctccggccaggctcctgtaggaggcagggtctgggctgagcaggtttcaggagagggaggggagtgtgaacagcaggtcccacttagagctttct

SEQ ID NO: 99 - DNA, 201 bp, Homo sapiens
  variation 101: note = n = C or T
  source 1..201: mol_type = genomic DNA
cgttctctcctgggttgcttttcgtagacttgcaagagaaacaacaggtgctcttagtctcctttggatccagaaagtcaccagaaggatctcctctatanggtcgcaaaggactcaggacaaggcagatgcattttaaaaatactcccgacagtgaggccagggagggagtggggtgcaggtgggggctggtgactgtga

SEQ ID NO: 100 - DNA, 201 bp, Homo sapiens
  variation 101: note = n = G or A
  source 1..201: mol_type = genomic DNA
tcccaaaagtttataagtgtaataaatgtctagtgaaatctttgactttgtaagcaatgataaatttacagataagtgacagcccctgcagaggcaaagcnctgctgtgaatccccagataactgtcatttatttatgtttctaaatgttcaagtaaaagcctgcattttcaacagcatctgtaatgacctcagagcttca

SEQ ID NO: 101 - DNA, 201 bp, Homo sapiens
  variation 101: note = n = T or C
  source 1..201: mol_type = genomic DNA
gctactaatggtgaagtgcaaagcagctgtgcatgcacagaaaggggcatgaagaggcagcctccacagtgtgaataaacacacctgtgttcaaagaccangccctgacagcgcccggcaggtgcaatgcaagtctttctctgatattcattcacggtcttggaatagtttttgttgtgcataattttaatagcatacatt

SEQ ID NO: 102 - DNA, 201 bp, Homo sapiens
  variation 101: note = n = A or C
  source 1..201: mol_type = genomic DNA
attccaggtaaaggcgcatgcgaagaccctgagaccagaggaagaagccacgaccagcagcaacctcaggaccagggcggagggaagccccaggggaaatnaggcagaagaaaggcaggaaattcatttatgtggaagaagaagctaaggggtgctagtggaccaggaagaaggaaagcatcatccaaccacagagaatca

SEQ ID NO: 103 - DNA, 201 bp, Homo sapiens
  variation 101: note = n = C or T
  source 1..201: mol_type = genomic DNA
ttctaattattggctatgcgatattggacatgttagtagaaccctatgaattccagttttatcatttgaaagttaagcatttcttgagtaactttatatgncaatatcctgaagtagcacacagtatagctcttcacaggttagtagaaaggtctttgttaaaaggctcttaccctaaccattgctttgttacaaacggat

SEQ ID NO: 104 - DNA, 201 bp, Homo sapiens
  variation 101: note = n = C or G
  source 1..201: mol_type = genomic DNA
ttactttctctgggtgaagtaacagggcagtgaaaccaacatgagagtgcaaactctcagaagacaattttaccacccatatatctattgattcatttagnctttattaaataaatatttactgaatgactactatgtacaaagaactgtgctaagtgataggaatcagcaggtgacaaaacagaagaaacacctgtctgc

SEQ ID NO: 105 - DNA, 201 bp, Homo sapiens
  variation 101: note = n = G or A
  source 1..201: mol_type = genomic DNA
cactagacgtagaattctaaaatggctgtctaaaattttattactatttacaaccaatatactatttattttgcattttctaagtcctgaatgaactatcnttaattatttttaggtagttaatttttccattaaaacataagtggtgttttagaacctctatgggaaaattattactaaactacaatgcactagttccaa

SEQ ID NO: 106 - DNA, 201 bp, Homo sapiens
  variation 101: note = n = T or C
  source 1..201: mol_type = genomic DNA
agccatttaacaaaaatattttacaggtttagaaaatgtttgggaaaggccactaacaaaactatcacggagcataagcatatttgtaaacaaagctaacntttgattttgaatatgccaaatttaacttttaaagagaaatgttgacttttcacttctgttcactacagctttcattatcaatgcatttttctacccgct

SEQ ID NO: 107 - DNA, 201 bp, Homo sapiens
  variation 101: note = n = C or G
  source 1..201: mol_type = genomic DNA
gattttctgaataaccgtatgtaataccaagagtcactataattagaattctgcaatgtaacacagtggaagaaatgatgaattacccatttcaaatctgntatcccattgccatttcatcaaatacatagatgaataattagtcatcataaattcacttcagagtatttattgagcacctatttggtgcttgggtctgtg

SEQ ID NO: 108 - DNA, 201 bp, Homo sapiens
  variation 101: note = n = G or A
  source 1..201: mol_type = genomic DNA
aacacattcattaagtatgttttaaagcttttggaagtgacccagaaccaagtgggtatggtcaaaaggaagtagtcacaaaggaaaaaagaatatctcanatttattgaggcactcactgaggacgtggtaaagctatatattacagatctgatgtggttgttctggtaggaacgaggtctgaggcattctcccatagtt

SEQ ID NO: 109 - DNA, 201 bp, Homo sapiens
  variation 101: note = n = T or C
  source 1..201: mol_type = genomic DNA
ttttgtgggaggtgacagagatgtgcaacagcaggtatggaaacttctaggactgaggtgagaggcaagtgggtgggatgaaaccaaaggagtcatagagntgtgtttgtaaagctaaaaagtagggtccgaagagtttcttcaaggagaaagaatctgcaactggtggcctgccacaagctaagtagggatgcaggggct

SEQ ID NO: 110 - DNA, 201 bp, Homo sapiens
  variation 101: note = n = G or A
  source 1..201: mol_type = genomic DNA
ataaattatcttgattggcataaacacacattcactctccacttctgagaaggagaaggctgagaagaagcttcttcccttattagtggctgaatggaaangaactgattttatagaattagaattctgcctgtagggaacatggagagatagagaaaatagatttgtgtgtttgtattgggggttttggcctacttggta

SEQ ID NO: 111 - DNA, 201 bp, Homo sapiens
  variation 101: note = n = T or C
  source 1..201: mol_type = genomic DNA
aaagcatctctatgggtaacaggaccattagactaagttcaagcaatagaatctccagcctgactctaaaacctctagcatgattcttctgctttttctangcttatcagccagttagaggcaaatgatccagaatcaatgtcagacgtacaagaagaaagaaccatgcttttctgaatgagtcagtgttaacagtccaga

SEQ ID NO: 112 - DNA, 201 bp, Homo sapiens
  variation 101: note = n = G or A
  source 1..201: mol_type = genomic DNA
tgtcatttgtaattaaaatgagggctttggctgttgtttgaggataaaaatgcagcacccatcttttcaaaataacttaattatggagatcatatgggggnttaactgagttttgaggacattcttttagagaataaaatgacaagaatgaaatattgcagatgtacagatagtaaaaaaaaaaaatccatggaaacaaat

SEQ ID NO: 113 - DNA, 201 bp, Homo sapiens
  variation 101: note = n = G or A
  source 1..201: mol_type = genomic DNA
aagacaaaatgggggaaaaatgtggaaggaagattggggaaagaggaggcaaatgcagagggcaagacagtaagggaacattctccttgttacacaatacncagaacctgccacagttttaaagtatctagatagaaggactctgtcctggaaagtcttgccttccccttggggttgggatttctaatgctcccaaggtga

SEQ ID NO: 114 - DNA, 201 bp, Homo sapiens
  variation 101: note = n = T or G
  source 1..201: mol_type = genomic DNA
acaaatcactatgttagttgaggtctgaaaaattgtctgtattagccaaatgtcaataaaccaaactaaaatgacaaaaatttccagacatatacacaagnaagttctggtgataatgcaatggaagctataaatatcagataaatcctaaagatctcttattcatgagttttcaggtattctattgccacaggtcattaa

SEQ ID NO: 115 - DNA, 201 bp, Homo sapiens
  variation 101: note = n = C or A
  source 1..201: mol_type = genomic DNA
cctaattgtgccaccccagatccccaggacaggggatcagcacctctattcctgttcttcagcatcatgtatttaattattttgtgtttatttgttctgcntgaaggaccgggcaaaacaatttgtactcccagaaaaacttaaaagtacagaagttttctaatcaggtctcacatggatgctatgaaaacaacagaagct

SEQ ID NO: 116 - DNA, 201 bp, Homo sapiens
  variation 101: note = n = C or T
  source 1..201: mol_type = genomic DNA
gctggtctcaaattcctggcctcaagtaatttgcccacctgggcctcctgaagtgctgtgattacaggtgtgagccaccacgccctgccagtgaagacttnttgagaggaatggacatcctttctacttcccagggcgtcccctgagacccagaggcccatgttttaaggaaataaagacataagtctggtggactctatt

SEQ ID NO: 117 - DNA, 201 bp, Homo sapiens
  variation 101: note = n = T or C
  source 1..201: mol_type = genomic DNA
cgagttttaatctgttcagaattattcttaaacagcactgcctaatcctaaaagtgtcaaaatcctccttgcaaggtgatattggtacagcagagaaaggntgacaaatgacaaaatgaacatatgatttcgaagtattagtatataaattccagacatctgcttggagaaaaatcaattagtgctcattaagcatttaaa

SEQ ID NO: 118 - DNA, 201 bp, Homo sapiens
  variation 101: note = n = T or G
  source 1..201: mol_type = genomic DNA
attgttgttgttttattcctgctcttaaaaaccttggaagtatcagaatgagctgtctaggatgaaagttaaatttcccagccctagagagaatcatgctngctctttcaatgcatttcatgagtcctagaaaaattgctactattatttacaattttcgattttttttccactggtaagatattgagttagctggcagaa

SEQ ID NO: 119 - DNA, 201 bp, Homo sapiens
  variation 101: note = n = A or G
  source 1..201: mol_type = genomic DNA
tctattatatttatatatagattaatatttaacttttccctagcttataacattaaaatttactgtaatctttaaatgtttctactaatttctcatatcantgcgatgtatatcctgacatctatgtcactgaatctgaattttactaactcccaaaaattattgccatctatttttgtatttaagacctctaaatgtaat

SEQ ID NO: 120 - DNA, 201 bp, Homo sapiens
  variation 101: note = n = T or C
  source 1..201: mol_type = genomic DNA
cctatctcaacttctcagctctttcttagagcattcattagccaaataaccatgttgctacttgacagactttagattgcagcttcatggaagcctgaaangtctcagggacaggccaaaccagagagcaagtgttacacaatcgctccagctaaatcggacagtcttctctttccaccatgtgatggttaatactgagtg

SEQ ID NO: 121 - DNA, 201 bp, Homo sapiens
  variation 101: note = n = T or C
  source 1..201: mol_type = genomic DNA
ctctctggctctcaaactcctgttcataatcactgcactctactgcctctcactgcactctgcctaacagagacaccacatactgactgggcacaacagtnggagtcttagggggtttaaatggattcatttctttagaaactctttatcaaggaccatagtaggcactggggatagagaaataaatcaggcagaaaagtc

SEQ ID NO: 122 - DNA, 201 bp, Homo sapiens
  variation 101: note = n = C or T
  source 1..201: mol_type = genomic DNA
ctcgcccccaataccacttggaagagaaggatttctgcaagagagaagatcctgtttattcgagcagaaatgtgccgtagggtccagctgctgtcttgtanagttgtggacgtctaaccaaatccttcttggggccttcagcttctttcagctcatccactcatcgcaaagatgggaagtgattcccctcactccttcccc

SEQ ID NO: 123 - DNA, 201 bp, Homo sapiens
  variation 101: note = n = A or G
  source 1..201: mol_type = genomic DNA
tagcacagagaagatgctgccctctctcccaaggccacctgttcttcctccctgtgcagtgcctgcctccgtccccactgagcatccagtgatgccctttnctaagaacctgggatgggtgagtcagaaggggcagctggtatctggtctttgactcaccggaagcatccctgacctgctgaatggaaaagtctcagctta

SEQ ID NO: 124 - DNA, 201 bp, Homo sapiens
  variation 101: note = n = G or A
  source 1..201: mol_type = genomic DNA
aaaatgtgccccttcttgctctccagctggctctgcccagatatcttcaaggagacctgaaatgaccagctgaaggctatggttcagaaatgagtcagccngggtggtggtggccctagtgggaaagctgacagcataagtgcaggaatggcagcaggcagtggagctggcaagacataaggtggggctgctgagcagagc

SEQ ID NO: 125 - DNA, 201 bp, Homo sapiens
  variation 101: note = n = T or G
  source 1..201: mol_type = genomic DNA
tttctctcattccaagcccctaattgcctctaggcattcagagaagcagccctggctccaccttacttgaagaatcagcacatgaacaaaatcagggcttnctgctttttcattctgggacatgactggaaaagtggagtggaggtttcccttcccttctaaaaatatgtgcgcatacactggcacactcacatgcatcac

SEQ ID NO: 126 - DNA, 201 bp, Homo sapiens
  variation 101: note = n = G or T
  source 1..201: mol_type = genomic DNA
aaaagggttgatattattctgcctgccaaaatgagtctaaacgtgtaactcatagcctgcacaagtcacacctccagtacactagtttgcaagtccttatngtcttcattcattcatgcgggagtctgggctttaggaaccagccttggtctgggagtcgttttcccgcctcccctacaatgtttattttatttaatggat

SEQ ID NO: 127 - DNA, 201 bp, Homo sapiens
  variation 101: note = n = A or G
  source 1..201: mol_type = genomic DNA
tttgatctttagatccagccattagatgtccagttcaggacaaaacgtgggtaacagagcaaggaaaaagatccccttttcacctctgctaccaagctcanagaggttgctatcagataggatttgaatgaaaaatcatgtgatggtcctgggtttagttaggcttttactgactccattcatcccgcaacaccccgtgac

SEQ ID NO: 128 - DNA, 201 bp, Homo sapiens
  variation 101: note = n = T or C
  source 1..201: mol_type = genomic DNA
gtttattaaaatgtgagaaaagtttcttgactgctttcatttaagtattgaaaatatatgataattatccaatgcttcaatattttaagacattaaatctncagtatgttgatgattaagtatatggcctctggtatttatattttcaggtgaagagcagaattgcatctaaatcagggtgaaaagtcctttccagcaata

SEQ ID NO: 129 - DNA, 201 bp, Homo sapiens
  variation 101: note = n = C or T
  source 1..201: mol_type = genomic DNA
tccatagttaagtaccccagagctaggctgaaatccagtgttggattgtttccaacttatagtagggaaccgccaatgacatgaaagagcattaccttacnggactgattcatattctacttccagtcatagtacaaatgatcacatgtccacacccacatgtgctctgataagtagtcaattgagaggagtgagtcaggg

SEQ ID NO: 130 - DNA, 201 bp, Homo sapiens
  variation 101: note = n = A or G
  source 1..201: mol_type = genomic DNA
acaggcctttctacatgctggatttcatatcttgttaagcagatgtattgatccaatttttgtggtcagctcaatggtacaggaactagaagaacgtgctngaaagcatattaaacacaagagcctcctccagaaatggtgatgcctttcatagtaatctaaggggtaagaaaggaaaaggatggataagtaagctcactc

SEQ ID NO: 131 - DNA, 201 bp, Homo sapiens
  variation 101: note = n = C or T
  source 1..201: mol_type = genomic DNA
tctcagcttcaggctcacaccaagtctcccataagaagccaatctgctcatgatctctcttcatgatgggattgctatttcttcattttataatattacangaccctctaatttaaaagttgctcccatctatagggcctcatgtcattggattcagacagaagctttgtaaaagaattttcagtgtctctagtttacagt

SEQ ID NO: 132 - DNA, 201 bp, Homo sapiens
  variation 101: note = n = T or C
  source 1..201: mol_type = genomic DNA
aaggaatgcagagttcaagctcttctttcaccatttgtaatttactgagccagctacttaacttttcttgccttgattcaatttctgaagagactaaaaangtttttcctaactaaatgatgtgagctgaacagatgtctttctgtcccagtttttatggcaaactcatttttccgcaattttttattgccaattttagta

SEQ ID NO: 133 - DNA, 201 bp, Homo sapiens
  variation 101: note = n = T or C
  source 1..201: mol_type = genomic DNA
ataatgacaatttttagaataattattcattctgatgggataaaagcatttataggctaaaaataaaaaccaattttattgccttaccaatattagtttantaaatttcaaattttaaaagagaaccctttaaagttttttatttttgtttctgaagctttaaactcaaaatacattttagagaacactttattgttactt

SEQ ID NO: 134 - DNA, 201 bp, Homo sapiens
  variation 101: note = n = C or G
  source 1..201: mol_type = genomic DNA
gagtggctgaaggaaaaggaataagttaggagtcatagaaataatctctaatccactgagaattttaatcttttaaattaaagcattagaaaacttaaagncttaatatacacaactccggtaatttaaggtgctctttatttgtacctagtaccatttccttaatcacaactagtaaaattagcaggcaagggcactgtt

SEQ ID NO: 135 - DNA, 201 bp, Homo sapiens
  variation 101: note = n = A or G
  source 1..201: mol_type = genomic DNA
cagaccctgcagagaggtgctcataaaatatgttttgaataatgaatatcactcatataggtttattgagtgtttacaagattcccagcctgggttaagcnttttgcagcttgtgtttaaaatataaatacctttcagtcaaaatttattttatgtggtgctacagcagatatataccttgctttagaaaataaataaatt

SEQ ID NO: 136 - DNA, 201 bp, Homo sapiens
  variation 101: note = n = G or A
  source 1..201: mol_type = genomic DNA
aacttctatttcttccaaactacataaactctgcacttcctttcctaggacaaatacaatatgagagggtatagtgctggcgttgttgcaggcccactcantagcccaataaaacgtgccctaattttcagctaattttgtttcttttgcaatgttcttcaatggagcattttaaggtttttccctcttataatctggcat

SEQ ID NO: 137 - DNA, 201 bp, Homo sapiens
  variation 101: note = n = T or C
  source 1..201: mol_type = genomic DNA
ttaggtcaacaagtagatgcaaaacaaaggcatatcttgatcagcttttacatttatcatatataaaacattaaaatagagaaaacttctagcacagagcngcaattcatgttgttggtcaagctggatactgcatagtggtgtcacttgcattgaccattctgtgaatggtggtccctggagctacatattgtggtggcc

SEQ ID NO: 138 - DNA, 201 bp, Homo sapiens
  variation 101: note = n = T or C
  source 1..201: mol_type = genomic DNA
atactgtattactcaccattaaaaatattttaatgttcttgtgcagttataaggtaactgtatactaagtgtagaagcatgtggattcacatttctatcanagacattttgtgaacctaattaatttgggaatctattagctttaccctagggtaattaattatgcaaacaagaaggtacacagaaacactggtatcacta

SEQ ID NO: 139 - DNA, 201 bp, Homo sapiens
  variation 101: note = n = G or C
  source 1..201: mol_type = genomic DNA
caatgctattgcaacaatgcctgaaaaagagtaacatggaaaatgtccaatggtcttcagctgttgttgttgctactgggattcatctctatgtggttttnatctaaattagtgtttcctaaataatatagagataatgaaactcaaagatgtgatcagacttattaacttccaaccttggcaagaaagtaaagtcatgtc

SEQ ID NO: 140 - DNA, 201 bp, Homo sapiens
  variation 101: note = n = A or G
  source 1..201: mol_type = genomic DNA
ggaactttttagcagcagaatcccatgctcttatggcaattaatatgttgtccatgatgttgtgcatggcccagtattgaagtaactttttatgaagaaanagtttgctctgctcatttgacccacagagtagaaaggaataggagggggagtgagaaaaagggaatatgagataaaccaaaaatacattcggaacaaaaa

SEQ ID NO: 141 - DNA, 201 bp, Homo sapiens
  variation 101: note = n = G or A
  source 1..201: mol_type = genomic DNA
tcctttcagtgcttcctatggaccaaaccaacatgggaatcaaggagcacagaagtctgagaaacacaatttgtagtgaaggagtgaggaaaagatctganggcaaaatgacaaataggctcataccctaaatctaacaaagaaacacatggaaactgcacgtttatgcatgactactgagcgagaacaagataattgaat

SEQ ID NO: 142 - DNA, 201 bp, Homo sapiens
  variation 101: note = n = T or C
  source 1..201: mol_type = genomic DNA
gtaatgaattttcattaagaaaacatattaactcttgcttggcatagttcttccctggtaggattgcagcaaatcagagctttttatgggtggtcttttgnggggagaatcaaacccaataaaatatttggatacttttccagagagaaaaaaaataaatctcaagatgtatgatattcatctactgtgttatatggcagt

SEQ ID NO: 143 - DNA, 201 bp, Homo sapiens
  variation 101: note = n = C or T
  source 1..201: mol_type = genomic DNA
tcggcttagatacttaggattcacattcaagaatgatactgatggaatcaaacaaaaaggggccagtactttctgagctaattgtttagaactagattttngctccagctgcaataaattggaagatggatgatgtgagcatttgtaatttgtaatttaaaacttcgcgaaccatgaaactttctggagactttggtcagt

SEQ ID NO: 144 - DNA, 201 bp, Homo sapiens
  variation 101: note = n = G or A
  source 1..201: mol_type = genomic DNA
aacctaattcctagacccatttgactttaaatctattaatcatgtgttcatttatttaaagtaacctggactatataagaggctaaagatgaagggatatnaaatatggattttaaagataacaatcatcgtctcagtctatctaaatgggcttctataattcccaaactaattataatattgaatacttctttccttatt

SEQ ID NO: 145 - DNA, 201 bp, Homo sapiens
  variation 101: note = n = C or T
  source 1..201: mol_type = genomic DNA
tttttatcttatactcaagtatttcctcctcaatgagtttaatattgctttctatgcctaaaacctcctaaatacctgtcattcaccttaatgattccagntcattctttatgtatcatctgtatgtacttttttttcagggaagtcaatctgagcataccttcaccctactctatcctcatctcactacagcctgtgtct

SEQ ID NO: 146 - DNA, 201 bp, Homo sapiens
  variation 101: note = n = G or A
  source 1..201: mol_type = genomic DNA
ctcattagaaagttgccattggtcaataacgtttgtggagctcactaaaggaaggagaattataacggaacaatgtgaaccatccactttatcatgatggnatacttatatctaagtagagtatatcagagttaatcctttcatctgttcacttgagtagaaaacagtattttccaaaatatttcttagcatttattttca

SEQ ID NO: 147 - DNA, 201 bp, Homo sapiens
  variation 101: note = n = T or C
  source 1..201: mol_type = genomic DNA
gaaaatctcataattcccattctacccacattcatttgtgcccctaccaaactatgtggtgattgtccacatacagactagactttttgaaatgatgctanagcctgccatattctctgtttcatggaatcagatgtaaatttaactttcaacctgtattacatgttcaaatgaatttggatttggaggttttatttaaca

SEQ ID NO: 148 - DNA, 201 bp, Homo sapiens
  variation 101: note = n = C or G
  source 1..201: mol_type = genomic DNA
actttgtaccctgagataccttgctgtagaatctgctgtcttgatacttttcttctgaagatccctggtttggatggagatcattaccatcttagatttanagtccgattatcttattatttttaagtcctgcctgtaaaatgggctaataaatgtatatgtcacagggggaatttaagaattaaatatgataatgtggaa

SEQ ID NO: 149 - DNA, 201 bp, Homo sapiens
  variation 101: note = n = T or C
  source 1..201: mol_type = genomic DNA
caccagcttaaagaggaaatggagagtgtgtttgcgtgttttctgccatgaaataggcatcctgagacaatctcttcataactgatgtagcccagccctcngtactgaaattgctggactcacacgaggcccagatgtggtttaaagagcatgtgggggaaatttccgtaggagcaacacagatctctctattcagagttt

SEQ ID NO: 150 - DNA, 201 bp, Homo sapiens
  variation 101: note = n = T or C
  source 1..201: mol_type = genomic DNA
cttcccccatttctccactttctcagctccttcctttcccaaggagtttgcaataagaagacctgttaagtttcaaaatcacccaatttaccctctggtcnttattggaagcttttcttcatttccaactagaagcacagatcttctgtagatacaggtactgtttgagcttccagacacttcacagttcacaagcagtgg

SEQ ID NO: 151 - DNA, 201 bp, Homo sapiens
  variation 101: note = n = A or G
  source 1..201: mol_type = genomic DNA
gatgggagtttctgagcagaggtggcatgcccatggtaccctcctgcttatgtggttacctgtgtcccaaggtgggtcagcctgtgttcaggatctcacanagtctctcatgaaaatagttgtgggcttcagactcattctttgctcccaaatcaaagtttaacacaaatcatgggctcttgtgtggctctggcatggttc

SEQ ID NO: 152 - DNA, 201 bp, Homo sapiens
  variation 101: note = n = A or T
  source 1..201: mol_type = genomic DNA
aaatatcatcctaccattctctgacttaaaaggctgcactaactttgcattttcctggagttaaatctcatctcagactgtggcttatgatgtcttgcttnttctcctaaacttgcctcagcttaccctttcattcccatactctatcctctatcctcactacactgatctttgcagagtcttgaccaacgtttcctgact

SEQ ID NO: 153 - DNA, 201 bp, Homo sapiens
  variation 101: note = n = C or T
  source 1..201: mol_type = genomic DNA
acttctcataatttggatttagaaataattaatcatgacaaactaggaaaaaagttgatatttaactctcacaggtcctcaatgcagtgtaatctacacanctttgagaagaaatgtctagtcatggactgtccttgcttgcaagattgatttagcgaaggctgtaaaatttctcccaataaggccaataaagatataaaa

SEQ ID NO: 154 - DNA, 201 bp, Homo sapiens
  variation 101: note = n = G or A
  source 1..201: mol_type = genomic DNA
ctcagcctcccaaagtgctgggattacaggagtgagccactgcatccagcaagttcaaaatatatttctgatcaatgataaactagaataaacttgagtgnacagataggtatttgaataaaaagattctggctatacgtcttttaaataatacatttatggttatgttaattcacaggacctggttttattagggaacta

SEQ ID NO: 155 - DNA, 201 bp, Homo sapiens
  variation 101: note = n = A or G
  source 1..201: mol_type = genomic DNA
atcccctaaattgatgcagctcaacattacattaatgataagtggataatttactgtagatttggcggggaactggagtgtgagtgaggccaaccttgcantgttcccattctgcatctcttcctccttcctgttaggtaactgatggctccttacaaatctcctctactgaatagagcagtaaaactctcatttctaagt

SEQ ID NO: 156 - DNA, 201 bp, Homo sapiens
  variation 101: note = n = T or C
  source 1..201: mol_type = genomic DNA
tgtacatgtgcaggtcacaggggatatgatggcttagcttgggctcagaggcctgacaaacccctctgactattgactgctttcctttctagaaacccttnaccctttactatatcgtgtacctctatccctgggctggacttctggtccattccctggactcctgttcctctgcctgacacttcaaatgttggtgcttgt

SEQ ID NO: 157 - DNA, 201 bp, Homo sapiens
  variation 101: note = n = C or T
  source 1..201: mol_type = genomic DNA
caatcaggttttctcaggtgataggcatgttattgtaaagatactcaggaaagcaagaaagcacaggaaattggctcagtcagttgcaaagtcagaatagnggaaaatcatttttgctcaggctacagtcaaaattctaaataccccaacaaaaattctagctattggctgtgttttgattcaccttacctcttctccaac

SEQ ID NO: 158 - DNA, 201 bp, Homo sapiens
  variation 101: note = n = A or G
  source 1..201: mol_type = genomic DNA
gagcttcttaagtatatgcatggggttaaaaaaaacaaaagcagacagggcacataacaaaaacacgtctttgacatttctattgcaggaaataaaggagnagtgcttcagtcagccaacttttaaaaggtgaaacccaggtcatcagtgaaagtaaaacagcaatgcctcaaataagaaaatataccccttaataaactg

SEQ ID NO: 159 - DNA, 201 bp, Homo sapiens
  variation 101: note = n = G or T
  source 1..201: mol_type = genomic DNA
ggacctctattatttcccacaaaagaaggttacatgagattactccaagcatctgaagttctaaaataaaaatactgtttttcttaatggatcaatgcagnattaaatgcctgtgttttgcataagtgaatgataaacaatagtgcttgcactttcctaaagttttagagggcttcttagaaatagtatctgccaaatcta

SEQ ID NO: 160 - DNA, 201 bp, Homo sapiens
  variation 101: note = n = G or A
  source 1..201: mol_type = genomic DNA
tgtatacattcaataaataatgcaaaaaacactatttgagcttgaagtgaataaataatgttgggtttgagttattttggtaaatttcaagtgatttttgnttggtggtttgtcagcatgtttttagttgagttaatattcccagaggactacagcagcttaaggaggaatgaattaaaaagaaaacatattattctagga

SEQ ID NO: 161 - DNA, 201 bp, Homo sapiens
  variation 101: note = n = G or C
  source 1..201: mol_type = genomic DNA
tattgaatattaggacctttttatattttgtgtgcacattttacactagagccttctcatacactctaatgaaagatggactgcaaaattataattgattngttagtaggttggtgaacctccagcataaatctctatctttctctctctccgtctctctctctctctctctctctctctctctctctctctctctctata

SEQ ID NO: 162 - DNA, 201 bp, Homo sapiens
  variation 101: note = n = A or G
  source 1..201: mol_type = genomic DNA
ctagagactgtctttttgttggccctatattccgttggttttcatatctgttctaccttagtttctatctacattttacatgcatgttcccttttgccccngagtttgaggaatctggattctcttcttcttctgtgtcatggcttttaataccccatcatcaagtactttatgtacaactagcctttgagacactcaata

SEQ ID NO: 163 - DNA, 201 bp, Homo sapiens
  variation 101: note = n = G or A
  source 1..201: mol_type = genomic DNA
cattccctgcttcaagttgtaattttctgaacaaataactttaaatgtcattgtccctgtattctatactactacagcaagtttgaggatgtgctagttcnaaatacatatagagggtacattaaaattggttttcatttatatgcatttaaataatattaaagtactgcttaatttgggtgaagtaaattattctctcat

SEQ ID NO: 164 - DNA, 201 bp, Homo sapiens
  variation 101: note = n = A or G
  source 1..201: mol_type = genomic DNA
ttgttatcgatgtaacaactgtgtgaatgacaatgtttaagtgctaaaatatttgcaaaagggaatcggaatctgctgtttcttccaagtcattaaagcanagccggatagttgaaacaaaacagaatcatgcgtagttggcaaactgaacagaaaataacatccacacagcatgcccttctgccatgtactgtgctcatt

SEQ ID NO: 165 - DNA, 201 bp, Homo sapiens
  variation 101: note = n = A or G
  source 1..201: mol_type = genomic DNA
gtacaaaggggcaatgactgtattagaaatgaaaggaagaattaaacctatattgaagtgaatggggaaaactggagcataaataaaatactgagaaattncagttaactcagttgtacttcctaccaaggtggggatattactcccagagcagcacatcaagaaaagcttgaacttcagacttgaccttttcatcttcaa

SEQ ID NO: 166 - DNA, 201 bp, Homo sapiens
  variation 101: note = n = A or C
  source 1..201: mol_type = genomic DNA
ataaattaaagtttaaaaagttcattgaagagcattaactaggagtaggtacttggaaagtactatcagtagtcagtcacactggagaaaaagtgtgcaanagtagtaccagagcagtaagtgctgagcatgtgtgtgggctctgtacttacacaataaaacatgcacatacaaatttttcctactaaaatgatgacaaaa

SEQ ID NO: 167 - DNA, 201 bp, Homo sapiens
  variation 101: note = n = G or A
  source 1..201: mol_type = genomic DNA
tgagcaaatctcagacaccataccaaagcaatgggtagtaatagccagtaattggttagaatttggcacatctctccacgtcttatttctcggagaccaancatatcatattttttagataaatggaaggaaaaaaaaaaagaaaatcttgcccctttcttattttcgtcgaagaagtcacgtgacagccttggtttcctt

SEQ ID NO: 168 - DNA, 201 bp, Homo sapiens
  variation 101: note = n = G or C
  source 1..201: mol_type = genomic DNA
attgatgatagtaatattgtcttacctctgctaatgttttaaagtttgatgacatgttgtgcaaccttctttccagtacatttgatctcatttgacatttntcacggttccaaacttgaaggaactaaaactaagaggttagtggacttgcctaaggtcccccaatccatttagtttgggacttagtattaaatctatact

SEQ ID NO: 169 - DNA, 201 bp, Homo sapiens
  variation 101: note = n = C or T
  source 1..201: mol_type = genomic DNA
gccatgatcatcctgtcctgctttcatctaaggcatgcagccggtctggctctgattagatgccctgacagtagacactcttctcctcacgatgaaatacnggcatatttagcttagagaatcagtgagagaaatgtagttaccatacttttctttctggttggataaactttactctcattccaaaagagaaatcgtcag

SEQ ID NO: 170 - DNA, 201 bp, Homo sapiens
  variation 101: note = n = G or T
  source 1..201: mol_type = genomic DNA
tcatctccaatctccatgtaatcacctatcatcacttcggacataaaacatctgcaaccttagataaaggtaaccacatgaacattggcatagatgaaatngaaaagccaaaggaattgacggaaatagaaatatacaggtgtttctctgagggcacctcaaatggtactaagagggtgtatagtccactaatttaagaga

SEQ ID NO: 171 - DNA, 201 bp, Homo sapiens
  variation 101: note = n = A or T
  source 1..201: mol_type = genomic DNA
gagaagtagtactacatgattccacttatatgaagtatcaaaagtagccatactcacagaaatagggctttcttttttaatgaaagataagtggaagatantctagaagaaaagttgtataataggtttactgatgaagcacaaccctgtgatagaaaaagcataaagggcttgggaaaaaaagcataaaacgtatggata

SEQ ID NO: 172 - DNA, 201 bp, Homo sapiens
  variation 101: note = n = T or C
  source 1..201: mol_type = genomic DNA
ttgatcctccgctctgtagaacaaaattttatttgttgatttagatagtttgcaaggtctcatctttcctttgtttctctgcttcagttctcccattatantgcgagtgctagatatgaaatcatattatataaacaaacaataataggacaaaaggtcttcacagaacatagttttatggttttatagatcttctactaa

SEQ ID NO: 173 - DNA, 201 bp, Homo sapiens
  variation 101: note = n = C or T
  source 1..201: mol_type = genomic DNA
tttgatgcatacatgggatgttttcagtgctgaaaacaatagctattcttattagtagtattagtattaaattaaaacaagaggaaggttattttcaaaangatgcttcactacaaatgaagagtctgagagcacgattgtacagaggtaaatgaagaaatggcattgtctctgcgtataaatgaaagaagaggagcatga

SEQ ID NO: 174 - DNA, 201 bp, Homo sapiens
  variation 101: note = n = T or C
  source 1..201: mol_type = genomic DNA
ctggaaattacataataaaagagaaaaactgtaaaggcgttatagttggagggatcaggggttggtaacttgaatgggatttgtcattgtgtctgatcaanagagaaattattttcttacttagcacatgaacttaaaactcttcccctagctgcatcagaagagatagcacaaagaacaaaaagtgaagttgcattaaag

SEQ ID NO: 175 - DNA, 201 bp, Homo sapiens
  variation 101: note = n = C or T
  source 1..201: mol_type = genomic DNA
atgagcctttgctcccctggcagttcttgcagtgttgctggcttcagggtttgctactattgtgtttccagctggcatgactgcaggcgtcttgctttcangagcttttaccccatccatacattaagaatgggacacactgtaccccaaatcactaacaccaggaaaaatgccaatttcaacatttaaacagtttcatac

SEQ ID NO: 176 - DNA, 201 bp, Homo sapiens
  variation 101: note = n = C or T
  source 1..201: mol_type = genomic DNA
ttcttttcttcttactcagtaatcagataaaggcatccagcttcacccacaatttcttcaaatacattgaaaatggagttaaatattttcacaggtaagtnactttataaatcaatagatgagactactgtaactatattactagttcttttgacataaatattaaagggccatctttaaacatatgctcattttttatcc

SEQ ID NO: 177 - DNA, 201 bp, Homo sapiens
  variation 101: note = n = A or G
  source 1..201: mol_type = genomic DNA
tttcagctaaaaagaggctgggaaagaatggctggctaacacagctgaatcttttccctccaaaaatagatgtagtctcatacatttcctgaaaaataaantggactgtattagtctgttcttgcactgctgtaaagaaatacctgaagctggtaattcataaagaaaagaggtttaattggtccacagttccacagactg

SEQ ID NO: 178 - DNA, 201 bp, Homo sapiens
  variation 101: note = n = G or A
  source 1..201: mol_type = genomic DNA
gggagattatatttattgtgtggcataacgctgactataatgaagacaagactttctccctagtgttcattttgtgtgttaaatgttttaatcattttgancataagggctttccttcattattattgcaatgcagggaaggtctaaggttgtgtttcttatacaatcaatgataagagcaatttacatttagaaaatgat

SEQ ID NO: 179 - DNA, 201 bp, Homo sapiens
  variation 101: note = n = C or T
  source 1..201: mol_type = genomic DNA
atgtgcattttatagtctctcatgcagcaaaaacccaagtgaaatagctatctacactttgtagattcattaaatgcattggatacacaacgaaattgagnttcttatttatggtttccttcaataaatgtggttttaaaaattccttgtttgtgaataatttaagttcactgaaaggagtttgacgggttatttaaattg

SEQ ID NO: 180 - DNA, 201 bp, Homo sapiens
  variation 101: note = n = A or C
  source 1..201: mol_type = genomic DNA
ttttcctatcctaatttagcagccccagtgagggttttgaagtctcaagggaggggtttagaatgttctcttttttctcctgctgatgcttttttattgcnaggtggatggtgtttattttgcacagctaacaagtgagttcaaagcaatacgttgctcttgaacttttgccagattcccaaagctgaaagctcccctgcg

SEQ ID NO: 181 - DNA, 201 bp, Homo sapiens
  variation 101: note = n = T or C
  source 1..201: mol_type = genomic DNA
gaaaagaaaaaaaatttttttttaatttgtcgtgtgctttaaagatactcctagtttattcttccaaactagaagataatgcagtcataaaattgaatacntgttaccttatgatacaagagcattgagaatggctacagaaatatacaagtgttgcattcccaaatggaatcgagcagacaaaaaaacagcaattcagga

SEQ ID NO: 182 - DNA, 201 bp, Homo sapiens
  variation 101: note = n = C or T
  source 1..201: mol_type = genomic DNA
agacccttacagatcctttttcatatccttcttaattctttaaactatctcatcaatatcagcctttcccacctttccttacttcccatgataattagganaatatattgctcatcagctaatgctctgataattacaattatctcctataattacactagagcatcatgtaattatagaccaagtatagtggaagcatat

SEQ ID NO: 183 - DNA, 201 bp, Homo sapiens
  variation 101: note = n = T or C
  source 1..201: mol_type = genomic DNA
tttttaatcagatacctgacttcagcctcatggaactttttattactttctacttgtactctgtttgcctgcatgtctactagctaatttcctctggtttntcacagcatcactgtagtaatgtagaaaatttggatgcagaggttccaaatggcaattaaaaaaattgtatactttgttctattgtatttttttaaaagt

SEQ ID NO: 184 - DNA, 201 bp, Homo sapiens
  variation 101: note = n = C or T
  source 1..201: mol_type = genomic DNA
atctttataaacttctacactattcactcatggctgctctattaacattttttttctatttctgtgaatttaaaatagaatgctttgacacattggtgtancattgtgaacgaagtacatcacaaagtttctgtttctggctaagatggagtacgtaggaagataattaccctcccacctgaagcaacaaaaaatggataa

SEQ ID NO: 185 - DNA, 201 bp, Homo sapiens
  variation 101: note = n = A or T
  source 1..201: mol_type = genomic DNA
aggtcacaattttaaccatgttttcctagtattttgtctccctagctatctacttatttttttttagagtaaaaatcagatttggtcacagtaaattgttngtaaggtatatgggttatatttaataaatgttcaaattaatacatggattttatttagattattaacttctaaaaatgcccaagtatattaaaagaaaca

SEQ ID NO: 186 - DNA, 201 bp, Homo sapiens
  variation 101: note = n = T or C
  source 1..201: mol_type = genomic DNA
aataagttgtgcaacttcctgtgtttacttactgttttgacacatctgcacaaaatagaaaccaagtaatcatctttagtttttttattcttgaatcttgngaggttctgaattatttccttcttcatgataaatttaattcagaaacttattgtaactcacttaggtttattagagtagcctcccatatttatctccatt

SEQ ID NO: 187 - DNA, 201 bp, Homo sapiens
  variation 101: note = n = A or G
  source 1..201: mol_type = genomic DNA
ttattttaaatatagttatgataaaaattcaaaaaaattgaaatctttaatcagctaagtatagatcaatgatgagctgttaaggaattactgatcaaatntaagtttggaaatgtgttaataattttactttattattttgaatttggcattgtactaacattatggaaatgcttacattcattataggtcatgtggtat

SEQ ID NO: 188 - DNA, 201 bp, Homo sapiens
  variation 101: note = n = A or C
  source 1..201: mol_type = genomic DNA
agcaataaaagtttattaaggtgaaaagctatgtaaatcacaaaattatttacatttctgaatatgtaaaagtaataatcataaacaagtaatgttgatantgcatcacaaaattatttacatttctgaatatgtaaaagtaataatcataaacaagtaatgttgataatgctttattcatcttgtccatggttaaacaat

SEQ ID NO: 189 - DNA, 201 bp, Homo sapiens
  variation 101: note = n = G or T
  source 1..201: mol_type = genomic DNA
actagaatttgccaactaataacatattttcaagttatagactagtttggatatcatatattttagtttttaaagctccaaatttagcagacatacaaacnataaactttgttactaatcacagatatgctctttctcataaaccattaataaaagtcaaggcttaaggagcattataattttcagaggcttagttgaaaa

SEQ ID NO: 190 - DNA, 201 bp, Homo sapiens
  variation 101: note = n = A or C
  source 1..201: mol_type = genomic DNA
atccaataaattacagaagctcaaccatagaatgcactgccttcttaaatactatattattaaaagtgcacagtgaaaaacaccttgatacttgatgagangttagagttgagagttgaaaacttgttaagcttggactagataatgtcatgagtttattaaacagtctagttgctttgattttattcatcagattatttg

SEQ ID NO: 191 - DNA, 201 bp, Homo sapiens
  variation 101: note = n = T or C
  source 1..201: mol_type = genomic DNA
aagaaaatctcagacaaatttaagtagaatcaaccagactatcatcaataaccagactattcaataatgtaatttaggtttgggcaatatccatagcccanatcattaacattgatttcaatgtcaaacattatgtacatacacactctcctattggtgtcataaataacctataaaagcttggagatctttgcatagaag

SEQ ID NO: 192 - DNA, 201 bp, Homo sapiens
  variation 101: note = n = G or A
  source 1..201: mol_type = genomic DNA
cctcagaggaagaggttgggattttgaggctgcttgcgtgattgtaattgctgttacagtaatgtttatgttcttgtagatatttttattttcactcagcnagataaagggggaggtgattgacttttattaaggttaatatggaggctggcttccgtcttttaacctcactcttttccattttccactttgcttttttct

SEQ ID NO: 193 - DNA, 201 bp, Homo sapiens
  variation 101: note = n = T or C
  source 1..201: mol_type = genomic DNA
taattaggaacttaaagaggaagaacatatggttttgaacatataacttagcagtgtcctagacctctggcccagctgaggttttcccaggagtaagaacngagagagagtcggggctagaacagagagtggccaattaacctaaagggaatctccagagggacctagcagagagaaatagcagatggtattcatttgtga

SEQ ID NO: 194 - DNA, 201 bp, Homo sapiens
  variation 101: note = n = G or T
  source 1..201: mol_type = genomic DNA
ttacaattttccaattgtttcaaggttcagttatttatccatccaaatgtattttaacaaaagatataaaataaaatatcaaattattatttttccttcanatgactatccacttttccaatttgttgaataatacatgttttccattgattttatgtcatcttttttacattctgcacattcctctctctttcaactctt

SEQ ID NO: 195 - DNA, 201 bp, Homo sapiens
  variation 101: note = n = G or A
  source 1..201: mol_type = genomic DNA
aaatatgggcactcttctggaataagacttaaaagtcaaacataagcttttagacatgtgatttgcaccctttgttagaaggggattctaattaaaaaatnagtaagtttggcatttcaataacgctgaaaatacaaacaatggcaaagcaaaagaaggcatggtaagtaaagaaaggcacagacaacatgaagatactga

SEQ ID NO: 196 - DNA, 201 bp, Homo sapiens
  variation 101: note = n = A or G
  source 1..201: mol_type = genomic DNA
ttttgtttgtaaattgtccagtctctggtgtaacttcatcagcagcatgaaaatggaccaatacaacttcatttacatttttataattgtgctttaatatngagtcttggccaagtgtagtgcaaagatttcttatacttaatgtctttttgtttttgcttaaactttgtataaatttcattatgtaaagctgatttaagt

SEQ ID NO: 197 - DNA, 201 bp, Homo sapiens
  variation 101: note = n = C or T
  source 1..201: mol_type = genomic DNA
ggcttctgtaggacagcaacccccctgaggagttttcttctctaaattcatcctgccttgaactttacacacacatataagctccatttacgggaggattncagagttaattaaacgctgaatttgtttctttagaaatcgcatatgcctcggggttaaggaatagcgtttcagcaaccacgttaatttaggattaagcat

SEQ ID NO: 198 - DNA, 201 bp, Homo sapiens
  variation 101: note = n = A or G
  source 1..201: mol_type = genomic DNA
atatcatatcttcccactgtagtcaggatctattgctgtcaagtttttgctttattttttgccaataatggattatatatttaaaagaatattggaagaangtttgaaaaaacaagtttagaaaacaaaaatcagtgaaacatgaatctactatattacatgaatctactatgttaaaggttaggaattgagttttaatta

SEQ ID NO: 199 - DNA, 201 bp, Homo sapiens
  variation 101: note = n = A or G
  source 1..201: mol_type = genomic DNA
cttggcctcccaaattgttgggattatagcatgagccaccacacctggccgagagtggtgatctttaatgtccacttggtggaagaaagaaaatggaagcnagaactgagtgggaggaaacgaaaccgttaaacctcttgctttagctccttgagagacaagatggacaggcagagatgttgtagtggactcaccgctact

SEQ ID NO: 200 - DNA, 201 bp, Homo sapiens
  variation 101: note = n = G or C
  source 1..201: mol_type = genomic DNA
ggaagagaggctatgaaactcagatgttaatgtttttcctgtcacactagatttcatttttcaagtctttgtaacacggccttcttaaattgccaagttgntatctgtctgcctcccgtgccaaaatactgagccctgagaagtcagggccttacctcatgcaaaaacaccgtgttgcattcctgcgtttctccgtggcag

SEQ ID NO: 201 - DNA, 201 bp, Homo sapiens
  variation 101: note = n = A or G
  source 1..201: mol_type = genomic DNA
attgggtctaaaacggacggttctcctgttaattgctgttttattctatctgtgcaatcccttggctattgtggctatcacagagcggctttaagcacagncatatggatccacttacgaggcttcacactaaatttgttcagtgcttgatcttccatctctctaatggcactttttttttgtcaccaacacattcatggc

SEQ ID NO: 202 - DNA, 201 bp, Homo sapiens
  variation 101: note = n = C or T
  source 1..201: mol_type = genomic DNA
tccaaaaaaccagaggaacaatacgattggttttcctcaactggtgaaccttcatgagcacacacggacattgtagatgtgaaaagcctgaagtcaaaaangcccagccatgctgatactcctgggtagcctggtgaaaaatatcttgttattttcttttacctttttgcttgataatgatttagaaataaatttacttta

SEQ ID NO: 203 - DNA, 201 bp, Homo sapiens
  variation 101: note = n = G or T
  source 1..201: mol_type = genomic DNA
ggggtgtggggggtggagaaggcaacaagaatcatattatagtccagttaaaaaatatatatgtatagatttttataacaaaagacagtttcaaaataaantagtgactttaagaaatgtgtagagtctacttattaaattaggaggaaaacaaaattgatgttagtttgaattttaaatgccttgtttcacctctaaagt

SEQ ID NO: 204 - DNA, 201 bp, Homo sapiens
  variation 101: note = n = C or T
  source 1..201: mol_type = genomic DNA
ataatctgtagttgtggagattaagctaagtaattcatatggtgtaactagtacacagaaaactaaacaattttttccttaaatatctaaatgatgcatgntaactggtggaatcaagggattaaaagatagccattgaggttctatcacagcaaggtcctattttgggacgtatgttggatccagatgtatattctacta

SEQ ID NO: 205 - DNA, 201 bp, Homo sapiens
  variation 101: note = n = A or C
  source 1..201: mol_type = genomic DNA
ttacttacacataaaatatttatatttgctaaatgaaaattataattacctctaattcaaccattcagacaaataaaataatatggaagaaactcagttcnaactttctatataacagaaaagaaaaaaacaagacttactgtgcactcactctttatgacagacttttaacatttaatatatttcgaagcatttcttctt

SEQ ID NO: 206 - DNA, 201 bp, Homo sapiens
  variation 101: note = n = G or A
  source 1..201: mol_type = genomic DNA
gacattccttaaagagtggtagcttcttataaccatggggtgggggaaagccacacattaaggacagtgcagtgtgactaaaagaagagactggagcattnaacaattgctttagcactgaacacatcagcctggggctcattatagcctgcaaaaaaattacttgtttaacatacactttgttaatttctgttacatgag

SEQ ID NO: 207 - DNA, 201 bp, Homo sapiens
  variation 101: note = n = G or T
  source 1..201: mol_type = genomic DNA
atttttaggctcacaaaaacagacaaaatatttcagaacactgctgtctttaaatgaacccagtgctacacctacaccaatactgtctcattttctcaccngtactggagtcctgtggcttctgtaacatattaccatgaagtctgtggcttaaatcaacaggaattgttctctcgtccagaaggccaatcaatctcactg

SEQ ID NO: 208 - DNA, 201 bp, Homo sapiens
  variation 101: note = n = G or A
  source 1..201: mol_type = genomic DNA
tgttcagaaaagcaaacaaaaagtcaaacatctgtggctctagatgataatttagaacccttctactttctgaattgtgtaatattttaaatcccaaatgncttcagtattactccaaagattgctgctattacacagtatccaaagctaatgttaatacttctgaatagagagattaaaaacaatatctgaagacccaag

SEQ ID NO: 209 - DNA, 201 bp, Homo sapiens
  variation 101: note = n = C or T
  source 1..201: mol_type = genomic DNA
tgcattgaattgttttgatttgatgctttgcaaccccagtgttactggggtacacaatgaatattgtctactaacacatatatatgcaagtattcacctcnattgcttcattttggagactttttcagaagtaaatagaatatggattctttaccccaaactaaaacttactgaaataactttgagagttgtaataaaatt

SEQ ID NO: 210 - DNA, 201 bp, Homo sapiens
  variation 101: note = n = T or C
  source 1..201: mol_type = genomic DNA
agatgtataatacatgttggtaaagaaaactgtaagtttgaattctagatccagatttgtcccatacaagttctatatacttggacaaatctcccaatacntcggttagcttttctttatttttttttttttttttttgagacggagtctcactctgtcggccaggctggagtgcagtagtaagatctcagctcactgcaa

SEQ ID NO: 211 - DNA, 201 bp, Homo sapiens
  variation 101: note = n = T or C
  source 1..201: mol_type = genomic DNA
taaatctgatttgatctataacatttagtaacacactgggcttcttatgataaggtggcatcatttagaagtaaaccagaaacaaggacaaatagaaaaangtagtgtagaaaatgatgtaacagtaatttgaatgcctttaaaaaaagatagcaatgagagttacaactggccacagttgtgcaaaaattagtggtgaaa

SEQ ID NO: 212 - DNA, 201 bp, Homo sapiens
  variation 101: note = n = T or A
  source 1..201: mol_type = genomic DNA
ttatatattttatatattgccagttttattgttagtagtatattttattgttagaattaatttataattattattgtgttaacttaaagttgcctggaaanaagtaatagaagtatattgtagaagtatatggtcttgcttccaattagtgggataaaatggtgagtgcatatgaactaagatgacattgcactgtgtcag

SEQ ID NO: 213 - DNA, 201 bp, Homo sapiens
  variation 101: note = n = C or A
  source 1..201: mol_type = genomic DNA
ccctgtttagatacatattgcaaggcagggcacaaaaggatgatggtggtgggcttaagagatgtaagtaatagagcataagaatctatagcataaaaganaatgatgtgaattaacactgcagcatcgctcaaaatatttaagagtgttaagcaaaactaaaattggccagaggctgcggctataccttatatcctacat

SEQ ID NO: 214 - DNA, 201 bp, Homo sapiens
  variation 101: note = n = A or G
  source 1..201: mol_type = genomic DNA
tttattcctcacttactgtgccctcatgctcgtctcataaaacaagacagcaataaggtcgcaaagtttctctcccaaaggccatactcatggttcctctngacctcttcatagaataccagaacatagaagctgtacacctgctgcaactgcccatatgcttctgtgccagatgcagcttgctggaagttcatgcatgca

SEQ ID NO: 215 - DNA, 201 bp, Homo sapiens
  variation 101: note = n = C or T
  source 1..201: mol_type = genomic DNA
atggtgtaagttgaagagctcttctaatacacactttctttgtttgtggttctaaaaagagttgagctcagtacggaaagctcattacattcactataaanaagcagccttgttctaagatattcctgctgggtaatcatcattgtgaatatatgtacatctaagttcttggttagctttttttccacacccaccccctcc

SEQ ID NO: 216 - DNA, 201 bp, Homo sapiens
  variation 101: note = n = T or C
  source 1..201: mol_type = genomic DNA
tgggccccacctgaggtttatggaatcagaatctctgagagcttagaaatctgcattccgcaagccgctgggcgatttgatatgtatctcaccttttattnttttctaaactgatcgttctccttcattttcatcaaacacccattaaatattttcatcaaaaccatcatgctctcaacgcaagacatttgcacttttggt

SEQ ID NO: 217 - DNA, 201 bp, Homo sapiens
  variation 101: note = n = G or C
  source 1..201: mol_type = genomic DNA
aattttattagtagcaatagtagcattctctgaactttaacgtatctttgaaatttagattgacccaaagttgaataatttagttaagcaactagtctganagaaacattttattggcttcaaatttttagttgggtaaaataaagaatcaccgtatgctatatccagaaagcattaatgttgtcatttcatgaatgcaac

SEQ ID NO: 218 - DNA, 201 bp, Homo sapiens
  variation 101: note = n = C or T
  source 1..201: mol_type = genomic DNA
aatagagcaccttttttttcttgaaacatttttgtttcaattttcaattactcatgtcaaagcctgaaaatattccctaatagaattaaaatatatctgtngaaatgttcatggattttaattaaagactgctgttgtacctttaggtaaagaaaatataatgatgacttagacaaaatgactaaacattcttaaattaat

SEQ ID NO: 219 - DNA, 201 bp, Homo sapiens
  variation 101: note = n = T or C
  source 1..201: mol_type = genomic DNA
gggttttgtgtgatgtgggcaggaagcctgactttcagggaacgggtgggatgtggtgtcttgatgtccaggggaccgaagtgtggccgcatggtctcttnggctcagagcagaactgacaaccccatttgcctgatggggaaactgaggcccagagggaatgatgtggtgtgcaacaggtcccatggagaccaggagccc

SEQ ID NO: 220 - DNA, 201 bp, Homo sapiens
  variation 101: note = n = C or A
  source 1..201: mol_type = genomic DNA
cagatttgctttcttcttgtgggaaaccttctgcttggggatacctgacgattaactatacatacatagcatatatatacatgtatgtacctgtcaccagnatttcttaccataaatgagcttcctatcattctgaaatatccaaagatgcctgaaacattcttcaaaaaatttcataaattgagtaagaataggaactat

SEQ ID NO: 221 - DNA, 201 bp, Homo sapiens
  variation 101: note = n = A or G
  source 1..201: mol_type = genomic DNA
caattgatttgtcagagttatctaggtctcttggacaacaaccaacaacaatgacccactacaacttcacctcatgtatcttgaactttagggatatagcnccatttaaagagactaacctctcttggttcttgtcagtgaaactgggaagaagaatttggaggtatccaagaaaggtgtcttatctaaggaaaaattagt

SEQ ID NO: 222 - DNA, 201 bp, Homo sapiens
  variation 101: note = n = A or G
  source 1..201: mol_type = genomic DNA
ctatcaagataatggtagtaatgaaaaccccaagaagagacaggtctagaaaactagcaacagtcattttaagagttctgcctacatgtaagatataaaantgatgtaagtggctataccttctctagtttctgccttttatttctacaatgttcattaataaaagtgcctgatccaactgataaatcagaaaacacctct

SEQ ID NO: 223 - DNA, 201 bp, Homo sapiens
  variation 101: note = n = C or T
  source 1..201: mol_type = genomic DNA
catatcttagtaaccagtaattagaatagaagtttgcatcattctttttaaaaatatgtggaatgagttacttctttgttctgttgtttaaaacttgctcnggtgatgttaaagaatttctcctctccaccctggcactcatagtgccttgactaatcttcccagtcagcagcaggagtcctaaggcaaagtcaggcagat

SEQ ID NO: 224 - DNA, 201 bp, Homo sapiens
  variation 101: note = n = A or G
  source 1..201: mol_type = genomic DNA
aaagaatttctcctctccaccctggcactcatagtgccttgactaatcttcccagtcagcagcaggagtcctaaggcaaagtcaggcagatgcgggaaggnacactcatgatcgctgatgaggcctcctaggaaccacaaatctgttatggggggatttgatgctgcttatcaagtatctagtgagaataaatgactggct

SEQ ID NO: 225 - DNA, 201 bp, Homo sapiens
  variation 101: note = n = A or G
  source 1..201: mol_type = genomic DNA
ttgtttacagtaagataatttgttttaacacagaagatatataaaagaagtcagaaagactaagataatttctgtcactaggggcagaaagttatcaggancatggcagagataaatctaggaatgcaaaaagaaaggttacgatggaaatggaaacaataagctttgagaagttcaggggcattttgaagacagtattac

SEQ ID NO: 226 - DNA, 201 bp, Homo sapiens
  variation 101: note = n = T or C
  source 1..201: mol_type = genomic DNA
catggcacacatttacctatgtaacaaaactgcaaatcctacacatgtaccccagaacttaaaatgaaagttgatatatttcttttaaaaaagctcttttntcacatgaaaagaaattactctgattcgttcatctgtttaactatgtaatggggtacccagactttgtgtctttctgatgtggctgttcttaatgtttga

SEQ ID NO: 227 - DNA, 201 bp, Homo sapiens
  variation 101: note = n = A or G
  source 1..201: mol_type = genomic DNA
ctttcattccagacaattgtactaaaagctgagccactgctatatgaaatcatctgctaagtcatttctactgtgccaaaattttagactgagctaatttnagataaacatagctctttcacagatactctctatagaaagttgtttttgtctctttcttcttttactttttactttcttcccttcccttccctttatttg

SEQ ID NO: 228 - DNA, 201 bp, Homo sapiens
  variation 101: note = n = T or C
  source 1..201: mol_type = genomic DNA
cagcctctgtctacaaatcccctgaaactttacagttgtcaattatcaacagtcatcttacatatgttcctataaactctatatatttctaaaactttcantcttcaattgttatttttaccaatagcctaatgataaaatattctgtcacatatcttgaaagctgcaagagctttaaaactgccatatcagtaatgttac

SEQ ID NO: 229 - DNA, 201 bp, Homo sapiens
  variation 101: note = n = G or A
  source 1..201: mol_type = genomic DNA
ccctaagtccaaaattccctttcaataaaaaggggaaagttgggttcttggcccacatgtatcctcaatacattgccaaatcattctagctttcgaatganttacctgatgcttacaaaatatgaaatctttctgagccttctcaaatcaaaatggaaagaaaaatacttcagattgaagatttcaaatgcgagatctgaa

SEQ ID NO: 230 - DNA, 201 bp, Homo sapiens
  variation 101: note = n = G or A
  source 1..201: mol_type = genomic DNA
acctaaagaatcacagtcagcaaacaaactgtgtcactaactctctggggcctcgtttgtgattctttagaaacccagactaccttcacaccacagtgccntgtattcttcactgacagacttggaattatcactaaccactcagatattttttagctctcactcatcccccaacacacacacacacacacacacacacac

SEQ ID NO: 231 - DNA, 201 bp, Homo sapiens
  variation 101: note = n = A or T
  source 1..201: mol_type = genomic DNA
aaattgcttattgttcccagtgtcctggatacacctgcagatgtgcagtgacacagccagcgtgaaaaaactgtaaagcacatcatgtgtgtcttttgggnctccctctcccttacagcagtcatctttttctgcctcctaggactcctctcccttctctttgtaccagtctggatcattttcttattcttccccatggac

SEQ ID NO: 232 - DNA, 201 bp, Homo sapiens
  variation 101: note = n = A or G
  source 1..201: mol_type = genomic DNA
aaattatggtggttagcttttgtctgacaaaatggaaacggagtgaatgcaaaatatttggaatatagtttgtaggtagaaacaaaggaataagagtcaanatggtttaattcagggccatgttgtatctcttatcggccttctgcacttttgctttcatggctctttccaccatgaaaacaatattaagaactgtatttc

SEQ ID NO: 233 - DNA, 201 bp, Homo sapiens
  variation 101: note = n = T or A
  source 1..201: mol_type = genomic DNA
taggaaagttaccttcaagagaaagtggattaactcagggatcaactgagagctaagttgtaggatgacatgaggctaagcctcaagatctcataagtggntctcattttttgaaagttgtatctatccagaggttaaacacattgtcattggtcacagtggtgcagtggaagaacaaaattggtactgaaataaaaatat

SEQ ID NO: 234 - DNA, 201 bp, Homo sapiens
  variation 101: note = n = T or C
  source 1..201: mol_type = genomic DNA
catgtctgtgtttggcagaaataagacgcagctaactgacacaaagccgcctttatgacaagggtgcttccatttttcctaattgcatagatgttcccttnaccttcgaccttataaatatgtaaagcgttatggacgctgattccctctactggaatattgccgtttctaaactttgagataatgagttttgaggggagg

SEQ ID NO: 235 - DNA, 201 bp, Homo sapiens
  variation 101: note = n = G or C
  source 1..201: mol_type = genomic DNA
atttctagttctagatccctgaggaatcgccacactgacttccacaagagattctggtatgtggtgttccaaagacctttatttccaggccaatgcctaantctatggccttactaagcaccatgttgttagcttatccttagtgtgaattctttgaagttcctttgcatttacccagctaattcatgcctgcatgccttt

SEQ ID NO: 236 - DNA, 201 bp, Homo sapiens
  variation 101: note = n = A or G
  source 1..201: mol_type = genomic DNA
ttttaaagagatctttttgaatgctgttttactttttatttacaatgtaatcttcatttcattttataaagtgaaacctaattttaaagtatcttttgtcnaggaacatgttggtgtttagaattagctctatattaaaacttgtctgcacatttgcatgccatgcaatattctggattccacttcctttatcaggaagac

SEQ ID NO: 237 - DNA, 201 bp, Homo sapiens
  variation 101: note = n = G or A
  source 1..201: mol_type = genomic DNA
aaatgaggaacgtagactacttctgcccccctacccctggatctgactacatattggttttgtccccagttcttctatttgggggataaaatgaaattacngtttcacatactatataactaccatagagctaccacatgaatacattgtgaacccactttttggctgatttgttcagaagtgaggacctagtcttagaag

SEQ ID NO: 238 - DNA, 201 bp, Homo sapiens
  variation 101: note = n = T or C
  source 1..201: mol_type = genomic DNA
tagatttacagtatgtgaagacaataaaaataggtgaggctgaattaagctaatactctaacttacttggaatgagtattactaacctacactttactaangaatattgcatgtctataactagggtcatcaataataagacaatgatacatttttttaaattaagttctggggtacatgtgcagaacatgcaggtttgtt

SEQ ID NO: 239 - DNA, 201 bp, Homo sapiens
  variation 101: note = n = T or C
  source 1..201: mol_type = genomic DNA
tataatgcatattatactaattataatacaacttctaaacatgacagaatacatgtgccttaaattaacttcatttgaatttagggagagtaggatgatancttcaaatttatattttctttaaaagtagacttctcccaattcttgttatttatccactcaaatgaatatgtttctctaaggtaatcgaagtgtcaagga

SEQ ID NO: 240 - DNA, 201 bp, Homo sapiens
  variation 101: note = n = G or A
  source 1..201: mol_type = genomic DNA
taataaaaatgataattgtgctgttagtggttttattaatgtcattgaagttagagcagggagatgaattactttatggagaaagaagataacacataagnaccacgtagataaaatgaccctaggattaaggccttagaagaatgacatttccaaatgtgagcctggttttacacagtatcaagatacttgactggaaac

SEQ ID NO: 241 - DNA, 201 bp, Homo sapiens
  variation 101: note = n = C or T
  source 1..201: mol_type = genomic DNA
tcacaagattctatgtgatatgcttggcatagcatgtttttagtatcagcccttctttccccacatatcccatgatttccagaatctctgcattttctagngaccctacttgtcttatggaatctgagtattccttcttgccttgccttttacatatattggtgtgtttcatcttttaactataactccctctgtgtttca

SEQ ID NO: 242 - DNA, 201 bp, Homo sapiens
  variation 101: note = n = G or A
  source 1..201: mol_type = genomic DNA
tattgttgtaaaacatttcactgtagtcatatatcagactttaaaaaagatgcctctaatatttactcttttaagataacctttggtttaggttttccatncatacccttaatagaaaagaaagtttaattctagttgtaaatcaatatgtaaatgttaatattaatttatttagaattttatcagttcttcaagtattaa

SEQ ID NO: 243 - DNA, 201 bp, Homo sapiens
  variation 101: note = n = A or T
  source 1..201: mol_type = genomic DNA
acgaatgctttatgcaacagcaaagcacttctaatcctgctgcttttgtgtgaaactatgcagaaagattgcctggcacgtgtggaatataagacagattnttttaatacagcatggcagtcagaagcattcattttgtttagtctgtgtggtatttgggggacattcccatcagggaggcactgtttgaatgcatattgt

SEQ ID NO: 244 - DNA, 201 bp, Homo sapiens
  variation 101: note = n = T or C
  source 1..201: mol_type = genomic DNA
agaaaaaaaaaagtagcaggtctgtggaatttttcctgagatgcatcaaagggatagaagtacagttccagttgttttcctgtgccctcctttaattaccnagtttctgtgatgtcacaatctagtttggaataaccttatcaacttcctgactctttcttcttctatcctattttccccttgtctcaaagaagaaaactg

SEQ ID NO: 245 - DNA, 201 bp, Homo sapiens
  variation 101: note = n = A or G
  source 1..201: mol_type = genomic DNA
tgtctcatataagcttgaatgtttaacccccacagagctgcattttaggtatacgtttgcacagcctattgtcatatttgctgcaaactgaactaggttcncttttcaacagtaaaggaaatgccaatcagaatttgtaaatgccatgtgcccagtgaaactacctctcatatgatacagacacagaattcatgattttaa

SEQ ID NO: 246 - DNA, 201 bp, Homo sapiens
  variation 101: note = n = G or A
  source 1..201: mol_type = genomic DNA
tccatacagggatttttttttttttttctgaggcttcttaagaacaacattgcccttaaatgtgtggatgagtcttttaatgctgatgcggtctatgcttngagaccaggctcatcatacataatacagggcttccgtacaataaagatgaataaatgagttaaaacagattttaatttgttaaatataaacatataatta

SEQ ID NO: 247 - DNA, 201 bp, Homo sapiens
  variation 101: note = n = C or T
  source 1..201: mol_type = genomic DNA
ttgcatttcccttctcgctttacctttagcctgagtctatagcatgaatttcacagcctctaatcttcaccagaggccaggagttttgttggggtggaganggtgtgatactgaacatagtgtcttagcacaaattagctgatctgtgtcccagctcctgacttgctctcacatgtacacttattgttcagttataatcct

SEQ ID NO: 248 - DNA, 201 bp, Homo sapiens
  variation 101: note = n = A or G
  source 1..201: mol_type = genomic DNA
gagaccccaattacagctctctccattgttcaattccctctcaggaacctaattacttttctgctaacaggactttgccagcaatattgacactgataccngctataagaagtatagtggaagaaactgtggaggcaggcatcctgggtcttggctttgcaatctggtcttggcaaatccaatagatttttctgagccact

SEQ ID NO: 249 - DNA, 201 bp, Homo sapiens
  variation 101: note = n = G or A
  source 1..201: mol_type = genomic DNA
cagagtagtgcagattcttcttggctgctgaatttttcttcaagcattcttggaatctattaccaattcctgttctttagaacccagtaaggggaaagtgnctcaatgcagactatattttcttgacctcatcttttctctgccattaaggtgaactaaaggaagcaacacaatttcatgtttagtcaccacagagtcaga

SEQ ID NO: 250 - DNA, 201 bp, Homo sapiens
  variation 101: note = n = T or C
  source 1..201: mol_type = genomic DNA
tggctttttaataactagcttagtagttagccgaaaaatcttagtttttaaaaatacaaaaaaaaaaaaaaaaaaaaaagagacagtctgatagtttattngtttttccatacactcttaattgaaactcagtagcagcctaagataaagcaacacatccgatgaattaaaatgtttcacagaatctttattacttagcgt

SEQ ID NO: 251 - DNA, 201 bp, Homo sapiens
  variation 101: note = n = C or T
  source 1..201: mol_type = genomic DNA
tggaagattggcgctctgcctcttcagcctcaccccatacgtgacaaggacccttgatatctcttgttaggatttaatctacccttagctatcagaacaancctgttctcaagagaaactctagaagctttggttcaagaattcagcaactgggactctgaccttgtgtcttggttctagtaacgaggtgattgccttcct

SEQ ID NO: 252 - DNA, 201 bp, Homo sapiens
  variation 101: note = n = T or C
  source 1..201: mol_type = genomic DNA
cgccttgtgtctgccagggctgtgttgctttcctggtcctccttcatttgtggggaggaggtttataggatgtttggaaatattgttccatcatctttgtnctccaactcagctcttaccagaggcccctgtaaaacaaatctttacttttcagctagataagttggtgctttatttcctacttggacaatatctaatcat

SEQ ID NO: 253 - DNA, 201 bp, Homo sapiens
  variation 101: note = n = G or A
  source 1..201: mol_type = genomic DNA
tgacctcaggtgatccacccacctcagcctccccaaatgctgggattacaggcatgagccaccttgcccggcctcttccttgaattttgagtgaccctgcntgtccctgaatgtctaatcttcattgatttctatctgtaaatggggatttattattgtgcttctgaacccttgtggtttctttttaattaggataaatga

SEQ ID NO: 254 - DNA, 201 bp, Homo sapiens
  variation 101: note = n = G or T
  source 1..201: mol_type = genomic DNA
attatagctgcatagtattccatggtgtatatgtgccacatttttactagctcaggattcacggcaagcccatttcattcatttgcctgcatggttccaanccctagttagtttgttatggcaacagagcagtcattcttgctgttagccactatttgtggtttcctccttcaaaagactaagttcattgaacttcccaac

SEQ ID NO: 255 - DNA, 201 bp, Homo sapiens
  variation 101: note = n = T or C
  source 1..201: mol_type = genomic DNA
gggcgttttcccagagtcactaggaaaatagctttgtgccatctgcacctgtcatgtcgaggaccaagactctaaaaactggccaagcaactacaaatgcngcagacaggcaagaggaggagacccaagctccgtgctctctgctatcccaggttcactcagccagcaccatctatatgctgatgattcctgtatttaagt

SEQ ID NO: 256 - DNA, 201 bp, Homo sapiens
  variation 101: note = n = G or A
  source 1..201: mol_type = genomic DNA
atggattctgccctgaagaaattcagtgtggttgggagataaagcatgcatgtaattgacatgcacgtaaaaggagggtagaaagttgtaaattccacaangaaagcatagctcatgtgctatgggccccgatatgacattaatgtttagcaagtattcatttacacacagacctgcacatttctcacgaggagagtatgc

SEQ ID NO: 257 - DNA, 201 bp, Homo sapiens
  variation 101: note = n = T or G
  source 1..201: mol_type = genomic DNA
agatgttagggctttgatcagagagattatgccaatgaccatgtacagcagtctcagctttggacaaattaatggctgtgtgtctcagatcaggagaccanggtcccagatggagctgttaggggctctatttccccttccgaggagtgcctacctctccactgtgttctctccctgagggatcaaatatgttttagtggc

SEQ ID NO: 258 - DNA, 201 bp, Homo sapiens
  variation 101: note = n = A or G
  source 1..201: mol_type = genomic DNA
taagcatagcaaagaaaagaaacacatcatatccccttctaatagacatgggacttggaattcattcataaagagaattccaaatctcatgtatgagcccnttttgttaagcaatagacgtttaatatgatttcatttttttttcattctttcatttggcatttgctaagaaattcttccacgtgttttacattctctatg

SEQ ID NO: 259 - DNA, 201 bp, Homo sapiens
  variation 101: note = n = C or T
  source 1..201: mol_type = genomic DNA
tcatgtttatatatttcccttgttaaacaaagccatttcctcatagtttgagagtatttataaattcccaccttgagttcaaattaatgaagtacaatgangggtggatttcagacagtgcaagctggtttgacctcaatggtgatagaaaacatctgaatttaattctgtccctgtctaccctattcttccctctttctc

SEQ ID NO: 260 - DNA, 201 bp, Homo sapiens
  variation 101: note = n = T or C
  source 1..201: mol_type = genomic DNA
gtctccattttgagtatttatattgaagccccattgtatagcacccctggaagggactcttgctatctttggcccacaacccataggatagaggcactagnactgagaggaatgagctgagcaggctaccattgactaaataggtctctatggcatttttcatagtaatctgccttagtgaagatgccatgggcaatacaa

SEQ ID NO: 261 - DNA, 201 bp, Homo sapiens
  variation 101: note = n = T or G
  source 1..201: mol_type = genomic DNA
tctctcaaatataatttttccaatatattctgtataagcaaataaataacaaatgacacagagaataaagatccacttgtccttaaaaaacataggggggnaagcagatttgtgaaggctgctaatgattgtggtcacttgcctgcaaatcataatggccaaggtcagaagtgaaataacttccaaagtggtaacctggag

SEQ ID NO: 262 - DNA, 201 bp, Homo sapiens
  variation 101: note = n = G or T
  source 1..201: mol_type = genomic DNA
gtgagtacaactttgttctgtttttcaagattgtttagctcttctggataaaatattctagtcttaacagctattgattatttcctttatgtgaatagatnggtgggagatagatgcataagacatgttcatctaccgaatacatgcaaatctaccttactcagtccccacacatatgcggttccagcgaggttgtaagtt

SEQ ID NO: 263 - DNA, 201 bp, Homo sapiens
  variation 101: note = n = C or T
  source 1..201: mol_type = genomic DNA
aacatttaaaaatcatatcttcacattaggatatcacctaacctaaaaacttgccaagaaactacctaatttaagactatatattgagttatttgagatanttgtttacataatagtctatgtttctttactgaagcttcctttgcctaaattgattagtttatgactactctaaaaaatctatattatctctagatttat

SEQ ID NO: 264 - DNA, 201 bp, Homo sapiens
  variation 101: note = n = T or C
  source 1..201: mol_type = genomic DNA
aaaaatgaataaaggaacatgaatggaaggatactagaaagagaactatgtttaaactattcttaattgtaatttaatggccgatatgttttgtggggagnggaggatagataaatatggtatctgtaaatactattgaaatgaattgtgtattattcaaagacatattaaaatacttgcgttggttcctttggaaataaa

SEQ ID NO: 265 - DNA, 201 bp, Homo sapiens
  variation 101: note = n = G or T
  source 1..201: mol_type = genomic DNA
ttttctgatagacaggttattacaatcaagtcaagaaatgattgcatatttaaacgtgtgattatatcataattcatatgctgaatatatgaattactaantaggacaactccaatgcttaggacataacacatacacccgagtaatatctttttgtttcacatctttctaatgaattccttcccactaaattattaaatc

SEQ ID NO: 266 - DNA, 201 bp, Homo sapiens
  variation 101: note = n = G or T
  source 1..201: mol_type = genomic DNA
agcctgggggccaggatcctttcctcccccattagtcctcattgtgaacagggaccattccctcctggccctggaagtagcctctggaggcccagcaatancctgatgcaaaggcaagagcagctctctcccctgggcaacattcttcatgcactattaggatcccaattcaaccccttccactatgagcagcacaagagc

SEQ ID NO: 267 - DNA, 201 bp, Homo sapiens
  variation 101: note = n = G or A
  source 1..201: mol_type = genomic DNA
ggatgctctcgtaaaaagggtttgtaaataatttagcacccccaagtagtagattctaagtggcaaacagcctgctgagaggagggctgtagaggccccanggaaaagagaactcaggacaaccagcttcacaagagcagggaccatggctgctggtcaccaccatacccccagcacctgcacagttcttggaccatggca

SEQ ID NO: 268 - DNA, 201 bp, Homo sapiens
  variation 101: note = n = A or G
  source 1..201: mol_type = genomic DNA
aaagtccacatttcagcgtggctgacagtgtactcggggtatggtccctgtatctctcttgagtctcatttttcattattatcaaatgctaattatcaaantgctcatgctttaatttggacttgtgtttttggtataccttcctttactaggcttgataggaagctcatggttcattgaaggcaacaacaaaacccaaac

SEQ ID NO: 269 - DNA, 201 bp, Homo sapiens
  variation 101: note = n = T or C
  source 1..201: mol_type = genomic DNA
accaccattaccaacaccaacaacaataacaaaacaacttttgaagtgcccagagtagaaaaacacatagataacacacagattataactctgagccatangtggcaacgaatttattctctcattgaatcctcacaacctaattaggtaggcactacccttatcactattttacaaatgacaaagccaagtcccagagaa

SEQ ID NO: 270 - DNA, 201 bp, Homo sapiens
  variation 101: note = n = A or C
  source 1..201: mol_type = genomic DNA
agactgtttcttcatttttgcaataggaaaaaacttcctctattttttttttcaatatttctctcctaatgtttctgctttggctcagagagaatggaganccctgcttcctttactcatcttgggcagggccaggtgaggggactttgtctctttgctgacttcactcaccagcttctcacaaaggcaagaggaattgct

SEQ ID NO: 271 - DNA, 201 bp, Homo sapiens
  variation 101: note = n = A or G
  source 1..201: mol_type = genomic DNA
aagaagctcaaggtgatagccaagccctccttccaaacaggaagaacaggtgcaagagtttgaggtgacaccagagagaactgtgtgcctggctgcgcatnagattgtgggattatcaagaaaagttggaaagcgggagatgaaaaggctaaactcaaaggcttttctcaaggaaggatggtcttgtttgtgtcacagtgc

SEQ ID NO: 272 - DNA, 201 bp, Homo sapiens
  variation 101: note = n = C or G
  source 1..201: mol_type = genomic DNA
ctccagggactgcggagtaggggtgaagagagaggcctggagatggagtggggcatggcactcagtgatgggggacggggtcggggatgcgaaatagtggntgttgcaatagctcatggagttcccaatgcgggtcagtcttctggttatgggtcactcttgaccacccagggtgctacttgtgactgactccctaatgca

SEQ ID NO: 273 - DNA, 201 bp, Homo sapiens
  variation 101: note = n = T or A
  source 1..201: mol_type = genomic DNA
atagctgtatgtgaacacacatacaggttgtgtgtgtgtgtgtgtgtgtgtgtgtgttttatgtgtatacacagatttttttttctagttttaacaaacangaggtcatgctgtagacaatactctgcagtttgctctcttcagatcgaacacatggttctgaaacacaaatcacatcatctctgtcctggctataaccat

SEQ ID NO: 274 - DNA, 201 bp, Homo sapiens
  variation 101: note = n = C or T
  source 1..201: mol_type = genomic DNA
gcaaatcattcagcttttcctcagtgcataacttacataattatttattgaaatagtgataaatgagtctgaaatattgatattctgcaataaatggtcanttttaattatgttcaaatggatgctttgcctgatagaattctgtcatattaataaatgttgcagagaaaacacattccttatactaacgaagggacaaca

SEQ ID NO: 275 - DNA, 201 bp, Homo sapiens
  variation 101: note = n = G or A
  source 1..201: mol_type = genomic DNA
caccatggagaccgagagctcctcagtggcagccacttcccagccagggacccaggggcacagttccactgtgttggtggatttccagacatttccaaggnagggttcttttgccaccttctcgctcttgcagcttgctgggagtgagagcagcacgtgagtaggggtctgtgtagggttcacatccaccagcccctgact

SEQ ID NO: 276 - DNA, 201 bp, Homo sapiens
  variation 101: note = n = G or C
  source 1..201: mol_type = genomic DNA
ctaatcctctccctcctcccctcatctgccctctgaatggccctggtatgattttaaaatttcattatttccttcttacctgccactttccaagactttcntaacatcttttcttgatactttgaaatccctatgattctttaaggtccaattacctccatgaaacttttcttaaaatttcaaaccaacagctgtgtcttc

SEQ ID NO: 277 - DNA, 201 bp, Homo sapiens
  variation 101: note = n = A or G
  source 1..201: mol_type = genomic DNA
tgatggaatgaggtttccaagggtgcagtgtaatggttagaaggtgcggcagccagggtgagtggggtagagatggagcctgctgaaagggattatgcacntgagaaaaagtaaacaactaaaggagagcagaaataatcaaaagcagagtgtgtcaggcttatgactcaaagcagtagccatgaaagttgttcggctgaa

SEQ ID NO: 278 - DNA, 201 bp, Homo sapiens
  variation 101: note = n = G or A
  source 1..201: mol_type = genomic DNA
cagctgtggcagaatgctttttcgacagggagaaaatggtcagatgtcatctatttgcttgaaagaaaagaaaatacatctcttagcatccagcgaaaatnataatgcttaaaaaaaaaagaaaattgcaaatccattctagctttgattcattagagagttcacagccaagagagagaaatgaaactctagctgaggtta

SEQ ID NO: 279 - DNA, 201 bp, Homo sapiens
  variation 101: note = n = C or T
  source 1..201: mol_type = genomic DNA
tagtgccaattatctcacctagagccacaagtgatagtttttatgaccttttataaaagtttagagttgaaataacatgaaaaatctaacccagtttcccngtttttctaatggtttcttagataatataattaaatgatgactatgcaaatggacagttattctgtgatgcttcagaaggaagtatttaaataaacaagc

SEQ ID NO: 280 - DNA, 201 bp, Homo sapiens
  variation 101: note = n = A or G
  source 1..201: mol_type = genomic DNA
agagcaccctgagaaagtataatagatgaggcaggtacatggaggtagcattcactttgacattagtagcaggtcattaataaggagaaggctgaagctancaactgtgctcaacgtaccaccttgcaagggaagtgattattgacttgtgctacacaaatattttaagacagcagaaaaatgcatttatctcctataatt

SEQ ID NO: 281 - DNA, 201 bp, Homo sapiens
  variation 101: note = n = C or T
  source 1..201: mol_type = genomic DNA
ctactaagaaaatacccaagctctctctttttaagaaacaaacaaaattatattgtttgttactgagttttattattcaatgccagaaagttggtggacanttaaaaaaatcagtatactttagtaaaattaatatatttgaatagaatctcatttaattctactcctaaaaaatttagctattttcattcaaaattaatt

SEQ ID NO: 282 - DNA, 201 bp, Homo sapiens
  variation 101: note = n = T or G
  source 1..201: mol_type = genomic DNA
gaccttaaagttggtaactacccttagatgacctttcacccttagccttgccacaagttctccagccaatggcattgaggagggggagatgggattggttntattaatcagcagctgtcacagaattagcagaatccagaggaaaccctgagcatgcctcagaacccaaggagaccctgcaggttaaacatgcacttggtg

SEQ ID NO: 283 - DNA, 201 bp, Homo sapiens
  variation 101: note = n = T or G
  source 1..201: mol_type = genomic DNA
tggggaaatgcagagagaagaggagattgccaagagctatatagaaattgtgtgtgtgtgtgtgtgtgtgtgtgtgtgtgtgtgtgtgtgtgtgtgtgttnaacttatgatgctagaagagaaatgataatcctatccccaaagctgccaggaatttccaatgcataacccattatacaccactaacatcacatgggacag

SEQ ID NO: 284 - DNA, 201 bp, Homo sapiens
  variation 101: note = n = C or T
  source 1..201: mol_type = genomic DNA
gtctcactgtagaaagacttgatcgcatattgaaattgactgtctatggcaagtgtcaaaaaatataaaaataatatcatagcttcctttgtacctcaaantaagtagcttcatattcctttgctcatgcaacccaatcatatttgggaagctgcagatgaaaagcatactgactttttcctttaatttttagtgaattca

SEQ ID NO: 285 - DNA, 201 bp, Homo sapiens
  variation 101: note = n = T or A
  source 1..201: mol_type = genomic DNA
acctgaccaggatgtttaaggtaagaatattcaataaagataggtggtgcttacaagtaaagcagtgtattggaaagataataggcagttttgattgtcanatagcagtactattttaatgagttgagcaaagggataaactatgtttaataactatgggtttaattgaattaaacactggagcatttacctcaatgagat

SEQ ID NO: 286 - DNA, 201 bp, Homo sapiens
  variation 101: note = n = A or G
  source 1..201: mol_type = genomic DNA
ttgtttttatgaatcatctgtcatagaatctgatgatatataatacttagtcctttaaaggctaatagcatttctgtgatggactttatatgtttcaaagnctttcacatgtattgaaacagcatcttgatatagacaagaaagactagggagatgaaatggtcctgagtcaaccaatacagaaacagaaacaacggctac

SEQ ID NO: 287 - DNA, 201 bp, Homo sapiens
  variation 101: note = n = G or A
  source 1..201: mol_type = genomic DNA
tcaactatgaagccacctcccatattaaaaaccccaagatgccacttgttctcccctttaatgaaatctacccgatgctcccccataggttttagtttgantatcagacttattctttcctcaagcttctttcatccagtcaaacaataagacacttaaatttccagcagtatattttataattgcaaggcttctgcggaa

SEQ ID NO: 288 - DNA, 201 bp, Homo sapiens
  variation 101: note = n = T or C
  source 1..201: mol_type = genomic DNA
agaagatctctggccagtatactcagaaagttataagcaagtgttacattcatcacattatatgataactattgtcactaaatacttgatagctatttcanaatcatggtcagccctgcactgtgtaataatgaaacaaatgttaacaaaatggtgaatacattttctcatatagcatataaatggattttgcatttaata

SEQ ID NO: 289 - DNA, 201 bp, Homo sapiens
  variation 101: note = n = G or T
  source 1..201: mol_type = genomic DNA
tggtaaatgcaaaatgtcctgtttcagatgctttatttatactccttctaataacagctaccttgagattgattaagctccaaatactagttaggatattngtttaactgccataataaaaagcaaattaataattaggtataatagaatttatttttgtgtgtgtaataggtaatgtaagcaatccaagcatgacacagt

SEQ ID NO: 290 - DNA, 201 bp, Homo sapiens
  variation 101: note = n = A or G
  source 1..201: mol_type = genomic DNA
ggcacaaaccactgtttcatttttttattttgtcgtactggaggttatattcacctgcaaatgaggtacaaagagccaaaatctttaatcagaatcaaagntctgtgcttactagttacctttgtactgacaaggagtttcacacaaatagaactgcaataatgtttattttcctggcagccaaaaccataatgctcttac

SEQ ID NO: 291 - DNA, 201 bp, Homo sapiens
  variation 101: note = n = C or A
  source 1..201: mol_type = genomic DNA
aagacaatgtgatttagataagtaatataatagcgcaaaggaggagcacccacctgtgacaagggtaatcagagaagggtttggataagaagtgatatacngaaagtgatacctacaaacatctcgggaaggtagatggctatttctcaaatgggaaagaaggtaaacatttcagcattaaggaatcatgtagttgagcat

SEQ ID NO: 292 - DNA, 201 bp, Homo sapiens
  variation 101: note = n = C or T
  source 1..201: mol_type = genomic DNA
actaacactgagaaggcaatgcaaacccttggcattttttgtcttagtgaaggttctactctaagccatggttcccatgtagatctcctaagtctgacttntccagtaattttttctgtttctctgaatctttaagtcacagttttgaaaacaaaggctaacctgattaagccttccaaacttaatctgccttgcttgctt

SEQ ID NO: 293 - DNA, 201 bp, Homo sapiens
  variation 101: note = n = C or T
  source 1..201: mol_type = genomic DNA
aatacatgcttatgaggtaattaatatccccatattcaggtaagaaaccgtggtatcgtgagcttaacgtcttgttgaggggtacatggagagttttttgncttcttggtatctggtaggtagtaattgtcagccagcatagtgatgggaaagaacatatccaatgcattctattgtggaggaactatttatatagcattg

SEQ ID NO: 294 - DNA, 201 bp, Homo sapiens
  variation 101: note = n = T or C
  source 1..201: mol_type = genomic DNA
gttgactgatggtggaggaaccccaaaatactttgttgccttctacaaaaactagtatagtcagtagggcaaaaatcattacctctgctctttattttttnccaaatatggagtgtgtatcatgtgttaagtaaaagaaatacaaatatggaattgtctactgttgtatcttctgcatgagaataacgcttggcccatcat

SEQ ID NO: 295 - DNA, 201 bp, Homo sapiens
  variation 101: note = n = C or T
  source 1..201: mol_type = genomic DNA
taaattgttatgatgtggccaggtttctttgctctctctacaatacctatttggtattcaggacattttgattgactgattatcatatacactatcctttnttatagccatcagagaaatagtcttaaggagatatcttgcatttatgtggcattttaacctttgtattaacgtgtattatcatagtacattctcaggata

SEQ ID NO: 296 - DNA, 201 bp, Homo sapiens
  variation 101: note = n = C or T
  source 1..201: mol_type = genomic DNA
attttcatcttttatggtaattcatgtagtcattcactgttttcaaagttgtttcttctagattatctcactatgtcctaaaataatacttatgaatgttngtccagctggctactttaatttccatcccttagagtcagtggtgacctggctgtcaattggtacaggtctgtccagttcctgtcctggatctgcccagtt

SEQ ID NO: 297 - DNA, 201 bp, Homo sapiens
  variation 101: note = n = C or T
  source 1..201: mol_type = genomic DNA
acatacatccatcttctggaattcttctggtttactcaaatactcataaccttcattaactaaaatccctcctctgagaaattacttctcagaaatgtgangtatctgttcctttctcagacttccatttaacttttaagcattcattttcactaattatttaacacccagattgtgccatctttaatatcagggattatg

SEQ ID NO: 298 - DNA, 201 bp, Homo sapiens
  variation 101: note = n = C or T
  source 1..201: mol_type = genomic DNA
ccctcctctgagaaattacttctcagaaatgtgacgtatctgttcctttctcagacttccatttaacttttaagcattcattttcactaattatttaacanccagattgtgccatctttaatatcagggattatgtatattacttctatatttatataattacaatttgcattcaagtatttttgatgctttgattatatc

SEQ ID NO: 299 - DNA, 201 bp, Homo sapiens
  variation 101: note = n = T or A
  source 1..201: mol_type = genomic DNA
agtactactcagtctgagcatgcttatgtttaatacctttttatggaagcaaatttgctttgggtaataacagaatatagttctgttatgtggtttgctanctttccctcaaccaaggacagattttcaaaatctcactgagaaaaataaagcttgtaaggagttaggggaggaatgtgtaatcgaggtttctctgaattt

SEQ ID NO: 300 - DNA, 201 bp, Homo sapiens
  variation 101: note = n = C or T
  source 1..201: mol_type = genomic DNA
acatacttagggattatcagcaaactcttttcccaaacctttgatatatttaaatgaaataaaacccctaggtggctttgaaaacagcatctttggcgcangcttttatctggagacatttccccaaatattttttaaaatgtgcatgcatgtactgtggggagacggggagaaaatgaacctcattgaactgcaattcat

SEQ ID NO: 301 - DNA, 201 bp, Homo sapiens
  variation 101: note = n = G or T
  source 1..201: mol_type = genomic DNA
ctaggtgccttggaaaattctgtcaatattagtgttagtttggagaactgtcttcagaaatataagacaacagtgataggaaaccaatttgtgacctccanaagtcattccatctggtttgtggaggattatgagattaacactacttgttagtgctatcattaataattatgcctctgtatatgtgtgcagaaatttagg

SEQ ID NO: 302 - DNA, 201 bp, Homo sapiens
  variation 101: note = n = T or A
  source 1..201: mol_type = genomic DNA
actaatattaattgaatgtgagttcattgagttttatttcttattttaaagttctcttggtgggcgcatgccatggtgcacagagaatgatggatggaaangatgaaattgttaataaaccctcagacccctatggcccactgggcccacagagtatgcaggtttgattttttttttctttggttccagccaccaccaccc

SEQ ID NO: 303 - DNA, 201 bp, Homo sapiens
  variation 101: note = n = A or C
  source 1..201: mol_type = genomic DNA
gccaagcctgatgaatggtccaattctatcaattaatatttttgaatactaattttttttaactgaagacaattgactgatgaaagatttagctgatttantttggctgagtacttcagttgtgtatgtagattgttgtggttttcaaagaccaaatatgtcagggaaacatctttaaatagtagaaatacactggatgct

SEQ ID NO: 304 - DNA, 201 bp, Homo sapiens
  variation 101: note = n = C or A
  source 1..201: mol_type = genomic DNA
atcctctagagggtgacaaaagacgagatatatagctatcctcaatttgaacatatggcttggcattgcttatagtgaccttgtgttagctcttagccagntttgcctggccagccagccagctattcttgacttcactatggtcatcagggcctaatgtctccttaatgataaccttgtctcattcctgtcatgttaatg

SEQ ID NO: 305 - DNA, 201 bp, Homo sapiens
  variation 101: note = n = A or G
  source 1..201: mol_type = genomic DNA
ttctgttcttttcatattatcaacatttttataatctgcattttttcatattgaaagaaaataaatttatttaaaaagagaaatggggaaatactaaaatnaaaacattttaattgattgttattaataacaacattatctaggaacagtaaaaattatgaaaggacaaaaaatagctgaagaggtaaatcaatttagaaa

SEQ ID NO: 306 - DNA, 201 bp, Homo sapiens
  variation 101: note = n = C or A
  source 1..201: mol_type = genomic DNA
ctgagcagttaactcctaagtatgagtaaaacaaggtgaatatacagaacccagatccagacatgtggtggagtcattttaaagaagaaaatcctgtcttntgggcaaggtatagacacccagaactccccagagccccagggtttttcttttgttaggagaaaagtatgtttctggtttaatctctctaattaaatagca

SEQ ID NO: 307 - DNA, 201 bp, Homo sapiens
  variation 101: note = n = C or T
  source 1..201: mol_type = genomic DNA
attttgaagacgaaaagcattactggattaaaacaaacaagtaacaatcaagatataatgacaatcttctaaacaatatcattatgaatctgaggaataantggtcaaaataacaacagaaaaaaaataaacttattggaaacaaagagaaaaataagttccaagaattttactgcattagcaatgggggaataagagaca

SEQ ID NO: 308 - DNA, 201 bp, Homo sapiens
  variation 101: note = n = A or G
  source 1..201: mol_type = genomic DNA
tttaaataacttgctcaaggttatacggttaaggaacggttgagcagaatttttacccggattagaatgtagaaagtttccaagagcaagagaccatcacntatcctaatagtaagaaaaaattaaagaaaaatttaaaaattataatttttggccaggcatggtggctcacacctgtaatcccaggactttgggaggccg

SEQ ID NO: 309 - DNA, 201 bp, Homo sapiens
  variation 101: note = n = T or C
  source 1..201: mol_type = genomic DNA
atatctcaaaggtaacaaatttaggctgcaaaactgcatgaggtcaagctggtgtttccagatgttcactcatgatattttccccttcatctcagtcccanattttgtgctagctgatttctcctgcagtagtcctacttgagtgtggcagagattatttctggatcactgttatgcacactttagttttatgaagtaaag

SEQ ID NO: 310 - DNA, 201 bp, Homo sapiens
  variation 101: note = n = C or T
  source 1..201: mol_type = genomic DNA
atttgctgcagtgaaggagccagtttttccataaatggctaacaggaatttgatgaagtgtttgcaacattaaatgtgttgtgggtcacgttgtaacttanattgttccccagcctccacttttccttgtttcctaaccaacctccatcccgccccacatgccacattcatccaggccttcaataggtctgctgtcagttc

SEQ ID NO: 311 - DNA, 201 bp, Homo sapiens
  variation 101: note = n = T or C
  source 1..201: mol_type = genomic DNA
catatacatgtatgcatacaaaatatggaaaaagtctaaaaggacaaatatgtatctggcccatatatatatataagagtacaagagacaatgccaacttncagagatttaggaaactcaaaatcattatgctaagtaaaagaatccaaacataaaaaactttataatatattattttacttatttgaaaatttagaaaag

SEQ ID NO: 312 - DNA, 201 bp, Homo sapiens
  variation 101: note = n = C or G
  source 1..201: mol_type = genomic DNA
aacattcttgtgtgtttctatcttttttttcttttaatgtaacaggagttacagaaaagctctgtttaccttctttcttttatgaaatcatggcaatgacnttagggcaaaaatattggaattcattgctggaggactgcttgagatggcatgattgattagtacaccgtccaccctctatctcttttcagatcacatcta

SEQ ID NO: 313 - DNA, 201 bp, Homo sapiens
  variation 101: note = n = T or C
  source 1..201: mol_type = genomic DNA
gttattgaagtagaatctctcaaacatattagtttcagatgatttcactctcaaaaaattatttgatatggaaaggggtaaatattgtgatcgttaatgangttcaagaatttgagactagacaagattttggaaccaaaggaaaatattaaaatatccttgtttagttttaaaataagtaatctgtcagagaaataactt

SEQ ID NO: 314 - DNA, 201 bp, Homo sapiens
  variation 101: note = n = A or T
  source 1..201: mol_type = genomic DNA
ctgatgctagcaaagatcttaatattcttatggctggtgatttaacatgagattgaataaaaaggatcacagcctctaactttaagttcattattaagacnccctgatcttcaccactttagagattttttttttgttgctagagtcaccagctttgtcttttcaaataaaaacttctcccatttatgttctatgacttct

SEQ ID NO: 315 - DNA, 201 bp, Homo sapiens
  variation 101: note = n = C or T
  source 1..201: mol_type = genomic DNA
tttttgatgtgatcttgtgatctagacactgttcctgacttatcgtctcagtcctccctataaattgagtccacactgttcctgttggaaagacattcatntatatcaaatgaacacttcaataagatgttcccatttcattttcagctgatttaaaccagcagctgggctccaatttgcaagttgaatttgcctgctcta

SEQ ID NO: 316 - DNA, 201 bp, Homo sapiens
  variation 101: note = n = A or G
  source 1..201: mol_type = genomic DNA
gaagtagttaatggcttgaaagctaagaagaggtataaagaaatggcatacaagacaaagtgggaagtttcatgattcaaggagagtaaaactaatgttgnatttttggagtatgtttccagtagtcaaaaagacttgttacctaattatttcctttttcttcaagaagtaggaaataaggtcgtttgtcctttattcaac

SEQ ID NO: 317 - DNA, 201 bp, Homo sapiens
  variation 101: note = n = A or G
  source 1..201: mol_type = genomic DNA
tctagaattattgctgcaaagatccggttatcctcacagggagtgagtgaaaaaaagtgggaagaaactaacttaattctaagaaatgagaggattacagntcccagaagataatcaagtgcttcaagacagttgattaagccaaattatatgtggtagagaaagatttgtggagcagtttcagaatatatacacatgtct

SEQ ID NO: 318 - DNA, 201 bp, Homo sapiens
  variation 101: note = n = A or T
  source 1..201: mol_type = genomic DNA
atctggccattatccatttgcgtattcaggttcccatacctgctgtccatcattttctcacattctggaaaaacacatgccttcacttctgcgataccacnaccctcttgggcatacttatgatccttttttaccttctccttcatgggggaatcctttctctgcctattaatttaattttgctgttagccaaatggctca

SEQ ID NO: 319 - DNA, 201 bp, Homo sapiens
  variation 101: note = n = A or G
  source 1..201: mol_type = genomic DNA
gtacttccttaaaaatcctgaaagtaaacaagaaaaatggccatctcaggttaaaatatatataagaaaaatgggctgtgaagacacagtttagctctcanaaataatggagacattcttgactgttgcttatttgattaaggtggtgatgatagaaattattttaagaatattaataataagaagatgatggtgataaag

SEQ ID NO: 320 - DNA, 201 bp, Homo sapiens
  variation 101: note = n = T or C
  source 1..201: mol_type = genomic DNA
aaaaaaaatacctgacatcacgtgaattttacttgtatttgttcaacagagtaactagatttgagcctctcatttctaaaggaagaggacaggtttttgangaacatccttaaaaaatctgacatgactctatgaataaacagctacatcgaggctataattattaggggagatacagaatcgggaagaagtcacgcactg

SEQ ID NO: 321 - DNA, 201 bp, Homo sapiens
  variation 101: note = n = A or C
  source 1..201: mol_type = genomic DNA
aaacagcacaagataaaagtgatcattttgcacctgctgctttccaggtgcctttaacttaaatagccaacatgccagagtactatattttaaccccatcncatctgtgtacatttctttgcaccacaacaataaaatcctccgttactgccaataagtttggttctggagttgttttcaggagctcaagcaccttaaggt

SEQ ID NO: 322 - DNA, 201 bp, Homo sapiens
  variation 101: note = n = G or T
  source 1..201: mol_type = genomic DNA
ttacaaggatgtgtgtgttgaatcctttccagagctcattgccaagagtaaattttgcttcttttcaggacatggaatgtctttcaataaaagctatgcangataagttaactcctttttaatattggcatcaaggaagcaaataaattaatcatatttagaaataaatgtcatttattatttttgtatagttgttaattt

SEQ ID NO: 323 - DNA, 201 bp, Homo sapiens
  variation 101: note = n = A or T
  source 1..201: mol_type = genomic DNA
atgtgcatagctgctatctggtacttatatttactacccttccacttgataaaattatcttatatcaccctcacgctacagcaaagcctgttaaatcaacncacccttttgtaaagtattttgggggttcagaagcaaatgttggcttctttaaagtagaaaagaagcagtgagaacagcataaagaattagggacaaaag

SEQ ID NO: 324 - DNA, 201 bp, Homo sapiens
  variation 101: note = n = C or G
  source 1..201: mol_type = genomic DNA
cacctcttactcgtcactgtcttgtacaggataaatggcaaaccactcaacatgttatatgaatcccttctactcccccggaatcaactctagcccttttntgcctgcagtttgtacatcatctagttgtagtccagacacctcacaacatttggtgtatttgtggctaggatgaccatcctatccactcttctctcatat

SEQ ID NO: 325 - DNA, 201 bp, Homo sapiens
  variation 101: note = n = C or G
  source 1..201: mol_type = genomic DNA
tgaaaatcacttagcctaaaaagtaatttctcctgacagtgatttgtttaggatttctaaatagcattgatttagccaccttctctataggaatatttgantttcacagaaagacttagttgtagatatagaatgttgctaaaatatgaaactatattagctcgttttcgaattgctgataaaggcatatccaagtatggg

SEQ ID NO: 326 - DNA, 201 bp, Homo sapiens
  variation 101: note = n = C or A
  source 1..201: mol_type = genomic DNA
agaggcagaccatattagcctggccaggttaccactggaagacaaaaaagctctctttaaaggtggtttctgcaccctggctaacgctatctattgcaaanggatcaaagcagcagtgtccatcgtgctgcattcggtattctgagatccattctcttgtcttgtcctcactcccccagttgctgatgatgtaggggatgg

SEQ ID NO: 327 - DNA, 201 bp, Homo sapiens
  variation 101: note = n = T or C
  source 1..201: mol_type = genomic DNA
gaaaaatgtaacattaacagactagaggttaaaataaaaaatagaaacaccaaaaataaggagggacacacacatttaaaatatggtagttaaaattaaangtattggatttttattttaggttaactttaaaagtttaacacaaggtcccagaaagtgagactcagagagagaggaaagagtgcttgttcgtggacacag

SEQ ID NO: 328 - DNA, 201 bp, Homo sapiens
  variation 101: note = n = A or G
  source 1..201: mol_type = genomic DNA
acttcagtgaagaaagagaagtaaacgctaacatttgttaaaaataattaaaattattttcttatatgtaaaatacattatgctatgttagattgtgttcntatatattttttgcataatgatatgagaaaaactcctttatcatctcctgctatttacttgttcttttagacacagaagctgtaatagctatgatagtgg

SEQ ID NO: 329 - DNA, 201 bp, Homo sapiens
  variation 101: note = n = C or T
  source 1..201: mol_type = genomic DNA
atgccattctgtaaacatggtatgattgtattaatcctctgcaaaaacaggaaaaggcatgcatggtaggaaatgttcccctgagtatttttgctattgtngatagtttccctttagttgtatcccaaaaagtagagagagaaacaaactctcgtgaaccatcacttagcttcatcatctatcaatattttgccatatttc

SEQ ID NO: 330 - DNA, 201 bp, Homo sapiens
  variation 101: note = n = C or T
  source 1..201: mol_type = genomic DNA
aatcatgaacacaatgatcctatcttttctgattatttggtaaaccagtaaataatcatcacttgttatttgtttaccataaaaatctgtcttccaagacntactcagtctccagtgcagaggcctgagaagcaacacatgaaataatcatccgggtgacccttattgttgggcacgtttgagataagtaccattctacac

SEQ ID NO: 331 - DNA, 201 bp, Homo sapiens
  variation 101: note = n = T or C
  source 1..201: mol_type = genomic DNA
atacctgtaagttttgcatagaaaattcagagtatcatattattcaatccattcattgaatgagcttatattgaattcctactttgaacaaggttctgctnagggacaagtcattgtccttataaaggcttaagtaaaagacattggctcagaaactgtatgttgtctaggaaccgtgacccactgactcacttttctttt

SEQ ID NO: 332 - DNA, 201 bp, Homo sapiens
  variation 101: note = n = A or G
  source 1..201: mol_type = genomic DNA
atgggcttaaagaggcctcaggaaccagagaatgtgaattcagcatcttgcacaaaaatctgcaattaaatgtttggtgcagatcctccataatatctacncaatgaatgcttaaaaatgctcaacaaactagatgtgaatctttggagaggtcaatgtggacaaatatgtaaattgccagggagcaggaatgttgtctga

SEQ ID NO: 333 - DNA, 201 bp, Homo sapiens
  variation 101: note = n = C or T
  source 1..201: mol_type = genomic DNA
tttagtcttcacttaaaatcaaagaaacattacctagctaaaaatatcagtccagtcagccataaatatgcaaatacgtatgtgtgtgtatgtgtgcatanatgactcaaatacacacatgtatgactctataaacacctgcacatttattaacattaattactttctaacatctgaaggttttattaaaaattagaatta

SEQ ID NO: 334 - DNA, 201 bp, Homo sapiens
  variation 101: note = n = A or C
  source 1..201: mol_type = genomic DNA
aacatcactaaaggaattcagtttggggatttctttccatttaagtatttaaaatttgttctttaatgtagcttcttctccagccccttaaaattaaccanatcacagaatgatttctgaaaataaggtggtaccaaaatctgaaatttaaaaacacaatttcattgttgaaaaattcagcactgtgattgtgcctgcttt

SEQ ID NO: 335 - DNA, 201 bp, Homo sapiens
  variation 101: note = n = C or T
  source 1..201: mol_type = genomic DNA
acaggaaaaatgtgatttccacaagtgatcctagcttttcacactttatccattcttttccttttgataaaatccacaggaaagatctcaaatttccacantgatgcaatcagaaaataaaatgttaaaatgttaaatacacaaagtaaaaagtcaatgcacatgaaatcaaaaattatatttatgaacgcaagttgtttt

SEQ ID NO: 336 - DNA, 201 bp, Homo sapiens
  variation 101: note = n = T or C
  source 1..201: mol_type = genomic DNA
aagtaaaaaataaaatcaaaatagaatgcaaaggaaaaattatgtcttccttggaagggagaacatcacacattaatgaaggaaaatgcaaagattccagngtgcacagcagggtaaaccatagcaatgggggaaaagaggatgtcagaggttagagctgtgagccattgattctcacaattacaataacagtagcagttt

SEQ ID NO: 337 - DNA, 201 bp, Homo sapiens
  variation 101: note = n = A or G
  source 1..201: mol_type = genomic DNA
gcctgggtccacgcgatgctgatgctgtggctggggcttgagaacaggagtctcgctgtggtcccggcgggctcttacttaaaggaaatatatgtgcaccnaagaacatgctatgcttttattctttcataaaggtaccaccaaaatagcccaaagcatgagaatttagaaccctatctgctccacatggctgttcaggaa

SEQ ID NO: 338 - DNA, 201 bp, Homo sapiens
  variation 101: note = n = G or A
  source 1..201: mol_type = genomic DNA
ccacaccccttccacactcaggcagcctggcttcaggtgtttctgagaggagatccaggctgagtgtgttcagggcatcctcagagaccgcacggctctcngggtgggggcagctggctttttggacccaggaagttgaacccaaagttacactggcctcgaaatgaaggaacagcacataaatagctcattaagaaggtc

SEQ ID NO: 339 - DNA, 201 bp, Homo sapiens
  variation 101: note = n = G or A
  source 1..201: mol_type = genomic DNA
ttttccatcttccttatctcaaggttttgtgggaggttggagttttttttttttccggatgggggaagtgggggtgtaccactcagaccaggaaaacaccnagatacctgcctgggtttgcagagccgtctcacaagacctgagtgttccccaaaaatcaaaagtctgtgtccttagaggctgcaaactcctcacttcact

SEQ ID NO: 340 - DNA, 201 bp, Homo sapiens
  variation 101: note = n = A or G
  source 1..201: mol_type = genomic DNA
atgtatgaaaaagtctactctattttaccttctagcctttgtgtgcatatctgtcattaccagggttcccaagtcagaaggtcgatcatcctgtctttaanaactgctaatcattctgtgagtgtgtgtgtgtgtgtgtgtgtgcgtgcacatgcatctctctcaacaaaccttatgtaggctctgaagcctcaatctagg

SEQ ID NO: 341 - DNA, 201 bp, Homo sapiens
  variation 101: note = n = G or A
  source 1..201: mol_type = genomic DNA
ctatcccttcacccattcacctgcccacccatttgttcttccatcagtcttgtactaagaagcatttaaatacccagctgtgtgtcacccgttacgaaganctcaaagttgaatagaacaaatcatgaaacctctcagtccccttgttcttcatctgtagaaaaaaagctttgattggtaagctctaaggccacttttagc

SEQ ID NO: 342 - DNA, 201 bp, Homo sapiens
  variation 101: note = n = C or G
  source 1..201: mol_type = genomic DNA
gtttctggggctgctctgctggcagcaggggtgagaggtggagtccttcaggagggaccaagaagggcaggccatggaggggccgcctttgtcatcaatantttggttgggatgaggtcaggatgggagagtgaggaccatccgttctcattttgttctgttcaccaaccctaacttcacatgcactgttcttgcagagtg

SEQ ID NO: 343 - DNA, 201 bp, Homo sapiens
  variation 101: note = n = A or C
  source 1..201: mol_type = genomic DNA
gaaattattacattggttcctcccccaggtgattcctaatcaaaccagagccttagaagcaccgacgttttagagccagcctctgtcgtccctgacttggnggacttttgctctttcatctgaagcgcgtctttcctctggtgtatttgcaaaagtgccctttgattccttttgtctcattttctttgaatgaatgtgctg

SEQ ID NO: 344 - DNA, 201 bp, Homo sapiens
  variation 101: note = n = A or G
  source 1..201: mol_type = genomic DNA
tataaaacacctaacatagtacatgaaacacagagattttcagtgaatggcacctgtcattattgattacatgtgcaatgagaagtgttagatttttgccntctcaaagaaacccatggtctacctaatgcttgtcaaaatcagaaaattgtgctactactcagatagaattggtaaagcctgctaagacctcaccgttgg

SEQ ID NO: 345 - DNA, 201 bp, Homo sapiens
  variation 101: note = n = T or G
  source 1..201: mol_type = genomic DNA
ggtgcgaggaggagtttctggttgcaacgaacaaggctccccctacaccagcattctatctctcggccccaagttcagctgcagcagataattttacgatntgttgccccaaacctctggacaagtttaagttctgatgggaaactgcagccagagatgcacagggagaacttagcttggggaaaattgaccttaagtgca

SEQ ID NO: 346 - DNA, 201 bp, Homo sapiens
  variation 101: note = n = G or A
  source 1..201: mol_type = genomic DNA
actttcccgtgatatgtagtatccctaaatgctccagaaacgtgtaagattgtttgctttagaatacactttattggtcaaatttttgagaaatcgagtcntaacaatgttgtggtttctctcatttttccagcaataccaacattggccagtatacgatgttaacgtgtatgcttaatgagccagtggcttcatttatat

SEQ ID NO: 347 - DNA, 201 bp, Homo sapiens
  variation 101: note = n = C or A
  source 1..201: mol_type = genomic DNA
caatttattaacaatttgctgtatggatacattttttcattaatagctctatgttcagtgtaatgttaaacttattaataccatttacgttttggttgganatgaaaacaagtctttgatattttatttccagtgtgctaaaggcaatacaattactgaaaaatatttttattctcagtaatgtgattcaggagaatatgc

SEQ ID NO: 348 - DNA, 201 bp, Homo sapiens
  variation 101: note = n = G or A
  source 1..201: mol_type = genomic DNA
cagtctcccttatttttgctgtgtaatctctgcagcatggtcatcaatcatgatgcattgggacaatgcatggggcaatcatgccatgtcaccatccacanaggagctgctgtgataaaccctaagctgatgtttccccaggtagctcataaaatacacttatccatcatcttataacatcgtaatggacacttgtgaaga

SEQ ID NO: 349 - DNA, 201 bp, Homo sapiens
  variation 101: note = n = G or A
  source 1..201: mol_type = genomic DNA
atgctatataaactcaagatggtattagaaaggatgataatttattgagggatttttttcaccaatggatctcagccctaattagacccactatctggacnctgttcaatacattcccagaaacgtgtagatcaatctagatcagcatacgtgagcagattctacaaatcagagcaaccctttctcataagaatttacgtc

SEQ ID NO: 350 - DNA, 201 bp, Homo sapiens
  variation 101: note = n = G or A
  source 1..201: mol_type = genomic DNA
atgctgtaggacacctatcagaccccagggaaatgatgtagcacacaggagtcatcccagttcacatagacagaacaatgttactctggaagatcagtgtntgaaaattgtggatgctttagtcttagcactcttcatacgacagcccatcctttgcataacatgtaagagccatttcaattcagccattctctctcatgc

SEQ ID NO: 351 - DNA, 201 bp, Homo sapiens
  variation 101: note = n = C or A
  source 1..201: mol_type = genomic DNA
aagcattaaaaaattgcattaagaattgcctttccctccccaccagaagaatggaggagaaataacatttattgaatatctaacacataatagggtgttanggcacttctacttgtaatgtctacatttgtttgtcatatctcatttatatctcatttaattctagatgaatttctcatatattttccattaggtacttct

SEQ ID NO: 352 - DNA, 201 bp, Homo sapiens
  variation 101: note = n = A or G
  source 1..201: mol_type = genomic DNA
actattcctgtcaaatgtacaaaaagcacatgtttactgactgtaagtctgtacaaatatttttaattcatgaagagtagcatgtaaatatcacacctatncaatactattttaccaaagtatgcaattagtgagaatcctagtatgctattgtgtgctttgcaagacagacatcttggaatttgaaagtaacaaccagct

SEQ ID NO: 353 - DNA, 201 bp, Homo sapiens
  variation 101: note = n = G or A
  source 1..201: mol_type = genomic DNA
tccatgatttatgcttaattttgtaatgaaatatttacatcatgatctcaagcagtaatttaattgtacattcagtaccgtgtgggattccggagcaggcnatgtgcttgctcattatctctagtgatctgtttgtgtgtgggctgtgtacctatgcttcatcccgtcatttgtccagcatccttgtattttctattttct

SEQ ID NO: 354 - DNA, 201 bp, Homo sapiens
  source 1..201: mol_type = genomic DNA
  variation 101: note = n = A or G
gtctggaatttcccagtaacctcaggaaatttaatggttttttttaacaggattaagtgcagacacggcattcacctaaatataaaatttagatttaacanctgttcaaaagtggggtcacagaaagtaaatgctatccattttgtaataatatgacaaaaatttttcagaagaagggggaggcaaataaggataagaata

SEQ ID NO: 355 - DNA, 201 bp, Homo sapiens
  variation 101: note = n = A or G
  source 1..201: mol_type = genomic DNA
accttcttaagtttccttaaatagtgatgtaagatattccacagaaaaccgacaaaatgcatctaacttagcaaagaatacagatctgcaatccaacctcntttatcattgagcacttggaagcacagggcaattatttttaaagctatatcaaaactcttcgtgagaaaagcaaccattgttttagaggtggaattgtaa

SEQ ID NO: 356 - DNA, 201 bp, Homo sapiens
  variation 101: note = n = A or G
  source 1..201: mol_type = genomic DNA
tatcagaaaaaaaatcagtcatgtggaacagtgcacagcctcaaattttagatatgaattctgaatcttaattcagaaagcctgatactcatataactccnactgtgtaaactttctgaccttcagatgaagcctcactaatgttttacacttattcgagaaagcactggaaagagaaacagtgtagacttgcttccccga

SEQ ID NO: 357 - DNA, 201 bp, Homo sapiens
  variation 101: note = n = G or A
  source 1..201: mol_type = genomic DNA
agaataatcacaatttaggagaagctcttcataaatacagaaaaatcagctagaagttaatacactgccatggaaaatggcatgcattttgaggtcagacngaattattttgaaagtgtatttctgcgtctctttttttgcctgtttgaatatgatttattaagcagctcatttttactcactacattttgaaagttttat

SEQ ID NO: 358 - DNA, 201 bp, Homo sapiens
  variation 101: note = n = C or A
  source 1..201: mol_type = genomic DNA
ggagtataaaagatacactgcttaaaattcggaccacaatatattaatcaagctgaataagatttacttagaagtcaaaggcacataaaaactaactgggntatagtttaattgttgatttgtatattttatgttaaagtatatcttaaagaaatcaaatattcttaatttacccagtgacattaaaatgaaaaatactgt

SEQ ID NO: 359 - DNA, 201 bp, Homo sapiens
  variation 101: note = n = G or C
  source 1..201: mol_type = genomic DNA
caaaggcagggccctcccaagtaagcggtcctgtgaggacatactgctaaatacctaccagccttgctgcacaaagagcagcttgtcatctgtctcctcangggatgtccacaaagaaaacacattcacatcctggcattgaaagttctcagcaattgtcctaaagtggcggcctccaagggacaagcttctgcctatata

SEQ ID NO: 360 - DNA, 201 bp, Homo sapiens
  variation 101: note = n = G or C
  source 1..201: mol_type = genomic DNA
cttcttctagagaaagccactctatttggaaatgtcagataaaaatacatgtacgttataaggctatcacctattttcagcgatgttttttcaagctctcncttttcctttctttctttctttttcctccttctgtttgctgttcccagtagcttctgggagcttcctcacccaagaggaccaggctcatcagatcacaaa

SEQ ID NO: 361 - DNA, 201 bp, Homo sapiens
  variation 101: note = n = G or A
  source 1..201: mol_type = genomic DNA
tgacattcaaggtgattcatatcagatcagtaaagagatcacaattttatgctaaagggaaaagttcctaatgttagaggatttttgagaatgaactgagntgacagttgtagaggtagctgggtccctttgggggtataagaatcattccagaatttataaattgcagggcataagcagtcagatattctgtctgcgcct

SEQ ID NO: 362 - DNA, 201 bp, Homo sapiens; identical to SEQ ID NO: 361
  variation 101: note = n = A or G
  source 1..201: mol_type = genomic DNA

SEQ ID NO: 363 - DNA, 201 bp, Homo sapiens
  variation 101: note = n = C or T
  source 1..201: mol_type = genomic DNA
aggatttggttaaaactgtttaagtggagtatgcaattggtatagattagggaaaataagaaaattatgcttttccttgcctgtgttcctctagctaactngggttttaggcagaaaagaagctaatggttgccatatcctggacagtgatttgctactgccattccttcttgggcacgtcaaaaatgctcaagtctttct

SEQ ID NO: 364 - DNA, 201 bp, Homo sapiens
  variation 101: note = n = G or C
  source 1..201: mol_type = genomic DNA
ggattcaataatttgcttggacttaaccggaaaattcagtcaagagggtctaaactaaaaaaaaaaaaaagtggtatattaaaatttggccagcactcctnaatattgatgaaacacctgagtgggcagtataggtaaaaggggtcatagactatgagataatttgtacacttcatggggcttgataatatgcatgactgt

SEQ ID NO: 365 - DNA, 201 bp, Homo sapiens
  variation 101: note = n = A or C
  source 1..201: mol_type = genomic DNA
ttatgtaacatcaggcaaattatttagattgtctggatatgttcattcagacaaatagagagacagagaaaactaaatgaaatggcacagtttgcaaatcntgtttcctgtttgaggattatttgtcagattgactattgatacatatatcatggaaaaaagtatgtaaaatggctgttgcaaataatggtttaaaataaa

SEQ ID NO: 366 - DNA, 201 bp, Homo sapiens
  variation 101: note = n = G or A
  source 1..201: mol_type = genomic DNA
gctaagcagccagttttagggattagtggctttgtggaggagatgagcacgaagaaagaagacagtataaggtaagggaaccaagaaaaatcgactgaacnattataatctcagcccaattactctttgttgactgtggaatcctgacgaaatgtgtgttagccagatgttagtgatcatgcaaaacactgaaagtggtca

SEQ ID NO: 367 - DNA, 201 bp, Homo sapiens
  variation 101: note = n = A or C
  source 1..201: mol_type = genomic DNA
tgactgataaccattaacaccctaaatcacagtggtttatggtattaaacccagcaaagaacaaggacctaagagagtcacctgacaaatttccatgagangagagataaggaacattatgggccttgtagcaaagtctttatttagagtactccagcatggagagctgctcagccaagggatgggtatgaagagcccagg

SEQ ID NO: 368 - DNA, 201 bp, Homo sapiens
  variation 101: note = n = G or T
  source 1..201: mol_type = genomic DNA
caaaagcaggaatatataggtaagtccttaatatgataaaatatagaagaaacgttcgtttctaattatgagaaacacaacagaaagtcttaaaaaaatgngattagataaatgtcgtgtgtgtgtgtgtgtgtgtgtgtgtgtgtgtgtgtgtgtataccaaaccaaaagtgagaatcatgcttagtggcaaatagtaga

SEQ ID NO: 369 - DNA, 201 bp, Homo sapiens
  variation 101: note = n = C or T
  source 1..201: mol_type = genomic DNA
tttgtgcaaagccctcagctcagagcccatgggacataggtagggtgggctcagtcatgtctgccactggtatcagacttcacttggagatttggagcccnggttcagtagggcaggaggagggtgtgggagctctgtggcctgagatttctatctttacctctttccttcacctacacattccatcctgcagtgggtagc

SEQ ID NO: 370 - DNA, 201 bp, Homo sapiens
  variation 101: note = n = C or G
  source 1..201: mol_type = genomic DNA
cccccctgacaaaaaaaaaagcttgtggacagaacccacccatggaagagcagagctaggaccctgataaaaaccatgcctgtaactgaaactactactanacttcttattaagggagattataaaattgtagattattttaagaaactgtttatgccaatttgagtcaggtttttgctttgttttttttctttttaacct

SEQ ID NO: 371 - DNA, 201 bp, Homo sapiens
  variation 101: note = n = G or A
  source 1..201: mol_type = genomic DNA
attcctttcctctctgtagatattgcttgtccccatgactcatattgaaggctagaatgctggttagtgcttcatccggtctgcagcatttgcaaatgagnaaaataatcccaaagagcaacttgtccaattatatcagcatatcattgaaaggtaaatgtgattattatgtttttggtataatgtataaagtacagcagc

SEQ ID NO: 372 - DNA, 201 bp, Homo sapiens
  variation 101: note = n = T or C
  source 1..201: mol_type = genomic DNA
agatcgtgccactgcactccagcctgggtgacagagcgaaactccatctcaatgaaaaaaaagaaaaattcatgcatttggtgaaaagcctgacccaattngtttaggcaaaaagactcacctccctgtgcctcctggggtaggtggggctccaacaaagttaccaggctctgttgttaggtttacacttctcagggcccc

SEQ ID NO: 373 - DNA, 201 bp, Homo sapiens
  variation 101: note = n = C or T
  source 1..201: mol_type = genomic DNA
gcagagacagctcatgacagggactaaggagaaactttgaaatttatcctgataaccagtggaggattttgagtgaagctaaaagacttgatcaaattagngctttaggaaaacaaaacctttgttggctttccattaaatatggcagcatcaacaccccaacaaaactctccttccttttctatctcctctacacgaaca

SEQ ID NO: 374 - DNA, 201 bp, Homo sapiens
  variation 101: note = n = T or G
  source 1..201: mol_type = genomic DNA
caaaagctgatattttgacaataatagttcaacttcttggttctgatgaaaacaaaaagaaattctaaggactaataatcttctttataaatgagataagnggcagactatagatacaggggagatttaaaaactttcaaacatgtaaatctttatagatttacttgaaaataatataatagataaacagttttccaggaa

SEQ ID NO: 375 - DNA, 201 bp, Homo sapiens
  variation 101: note = n = C or T
  source 1..201: mol_type = genomic DNA
gtatctccctaaagagtcaacagaggctgaatggaccactgcttttcttaagtcaatgcccagtgtcttccccgggccacgggggtttttgtgctttgtgntgaaagctattgctgagtcctattcagggtggaggctcagtcctggccagtggcctgggcagaagttgaggttctttaactcctcagacgcccttgagga

SEQ ID NO: 376 - DNA, 201 bp, Homo sapiens
  variation 101: note = n = G or A
  source 1..201: mol_type = genomic DNA
taaaatgtccatcttactatggatgatgggcacaaacttggaagtcattgatctaatctagcctcaggcttctaatgagtaacactataagtgttctcagngaaaaataaattaataagtatataagtagagtgtacatatcactttacgtttgtgactgcgaaatcttggggcttaaggaatgatttgacgttattatat

SEQ ID NO: 377 - DNA, 201 bp, Homo sapiens
  variation 101: note = n = T or C
  source 1..201: mol_type = genomic DNA
ttcctcagtgattgtgggagaaagggatgttgtgtttaatctcggggtcttcatttattgtacttctctggaagaggtaggccatttagaaacacccaaanggatatggaggaggcagggagctgtgttgaagctctaatcaactatgtgactttacttggaaataaggtctttaaagaggtaactgaggttaaatgagat

SEQ ID NO: 378 - DNA, 201 bp, Homo sapiens
  variation 101: note = n = T or C
  source 1..201: mol_type = genomic DNA
accactgctttgtcccttgatgggaccaatactgccaatgggattagaggtgggtgagcgtcagggctacctgaccatcacaccagattgctttgtttccntaaaaccagcagtcgtccagtgccgatagaaaacagagcaataaaacaagtcaaatgactgactccacttacccacatcctttttctccctctttgtcca

SEQ ID NO: 379 - DNA, 201 bp, Homo sapiens
  variation 101: note = n = C or A
  source 1..201: mol_type = genomic DNA
tgcttcttgttgtttgcccataccaagtgcatgaccactaagactttgaatttgctctaaccctaccgggaccagtctttctcttcacctccacgttgaanttgctgtccttttttttttctttttttgcctggaacattctttccatctccacatgctaccttctcatcaatcaggtctaggcttgactttcaccacttc

SEQ ID NO: 380 - DNA, 201 bp, Homo sapiens
  variation 101: note = n = C or T
  source 1..201: mol_type = genomic DNA
tggacaactgctttttttctgcctccatgtgatccaccacaggaagattcccattgttgtgtctcacctcatagatcagatcctcattcatgtgggcacangccttgttcaagtccaagtttattattcctcttggataatgagatctgaactgctatcttctccctacttccaggacagaggcccacagttgggtagcct

SEQ ID NO: 381 - DNA, 201 bp, Homo sapiens
  variation 101: note = n = A or G
  source 1..201: mol_type = genomic DNA
ttgcccaagctcgtctacagttccagggctcaagcaatctgcgcacctcagcctcccaaagtgtagctctaatgtagccttcttcaggctttttctttctnttatgatttgcatgttaatgtggtcccattcactttccaaaatgtcctattttctgagatgcttggcctattcttagtattattaaggatgtatttcatt

SEQ ID NO: 382 - DNA, 201 bp, Homo sapiens
  variation 101: note = n = A or T
  source 1..201: mol_type = genomic DNA
atcagtggagaaacataactaggttagcaattcccatgtgtataggtaggacaaaacaaaatccaaattcatgtctttttttgtgagtgaggcaaaaagtntcatatttagagaacagacaccatcatctgcctcatctttgacttagatatattaataatattaataataataatgactcacattgagtgctctccatat

SEQ ID NO: 383 - DNA, 201 bp, Homo sapiens
  variation 101: note = n = T or C
  source 1..201: mol_type = genomic DNA
tatatacctaaggttgatgaattttattgcatataaattataatacaatcaacttgaattttttaagaaatatgttacataaataagaaagtaaggattanctgttatctcaccactcagagatattttctggcaaaatatttttctagccatttttttttggtttatgtacatgcaggaactttgtctaacacaagtgga

SEQ ID NO: 384 - DNA, 201 bp, Homo sapiens
  variation 101: note = n = C or A
  source 1..201: mol_type = genomic DNA
agcctcatgtttaataagattactggacaagaaaataaggaaagtactgtaatataatgcatcctgatcacagcaaaaacaacaaaaaaatgatggtggcntaacaatatttagataagtctatctatcaatcttagtagtaaacacagaatctaattctggatattttttaaagaaaaaaatgtaaaggataactttaaa

SEQ ID NO: 385 - DNA, 201 bp, Homo sapiens
  variation 101: note = n = A or G
  source 1..201: mol_type = genomic DNA
tctttaatgatacttgaatttctcctgttcatgtaatacaatcattcacagaaaatgagagcagtgaaaactgccatgacattttatactgagcattatgnttgcaggaattctgtttactgatagctgtgtggaaaatagaacccatctaatagtaaggccaaagagatattttaaattcttgattaaattaaacctcct

SEQ ID NO: 386 - DNA, 201 bp, Homo sapiens
  variation 101: note = n = A or G
  source 1..201: mol_type = genomic DNA
tcttgtcttcatcttcatactgacctgagcttagcagctcatcttttgtctgattctactgatttttgtaaagttcaaattaggtccaattgctacataantacataatcattacataatttggattggaatcattctagttgaaagtgctggccagacacagcatgtggttgaataccttctcgtctgtctactaacata

SEQ ID NO: 387 - DNA, 201 bp, Homo sapiens
  variation 101: note = n = T or G
  source 1..201: mol_type = genomic DNA
tcattaaatgtttctttttatttgtttattttctgtttatatttttaaaactctcacatttccaaccaaattctgtcccagctttgaagcaagagtcctgnactttactaaggcattttttctgctaaacaagaaacaaaatgtgttcaatgaaataaagacacaagtgtgctttataatatattaaggactctgcagatt

SEQ ID NO: 388 - DNA, 201 bp, Homo sapiens
  variation 101: note = n = C or T
  source 1..201: mol_type = genomic DNA
gaaaccaagcttgaagaaacaagcaatctgggtctgagttacaggtccttcacccataatgtattcatttaggctcggttgtctcctttgaaaaatgaggngataggaggcagtggactaaaagggtttttgtactgtagtatgtcgtcacctgagcttatttttaaggctggcacggggagtagaacacagaaccatgtg

SEQ ID NO: 389 - DNA, 201 bp, Homo sapiens
  variation 101: note = n = A or G
  source 1..201: mol_type = genomic DNA
ataatgtcaattagattaagttcacattttgttaaccctacctgtaccctcctcctacgccactaccactcaggggctaatcattttgggtttttacagcntttgagccaggtagcataggggatagaccaatgtttcaaacagctttggctcatgtttggattcaactttcatgggtcctaaaacctaaacacctcaaga

SEQ ID NO: 390 - DNA, 201 bp, Homo sapiens
  variation 101: note = n = A or G
  source 1..201: mol_type = genomic DNA
tactgggccactgaccagactgagatcctatggattccagctgcctatttgctttaacgaaaacacagctgctcttactttttaatccctctttactgtcntcatttatctaagtcagtgaattcatattttctcctttcaattgtattatttaggaggataggttagccatttctattattcagggtgttaaccttcacc

SEQ ID NO: 391 - DNA, 201 bp, Homo sapiens
  variation 101: note = n = T or C
  source 1..201: mol_type = genomic DNA
tttttaaaaaccaaattacaccttgtggtgcagactgggttaaaaaaattccaaatgtcaacatgattctaatatgtgatgctatagggcttatttttccngagtttaaaaaattatattttctgtgcttggcatccacactgtgctctagggaaccacattatatctgtgtacttcactgatcttctttgtggaactaca

SEQ ID NO: 392 - DNA, 201 bp, Homo sapiens
  variation 101: note = n = T or C
  source 1..201: mol_type = genomic DNA
aggcacatactgagaagagaatatacacctcactacttaagtttcgcctgacttctttttttaaataatgtcatagcaaaatgatttctctatcttgattnaaaaccaggaaaagaaaaaaaaatctccagcaagcaaatctgtccagtgagatgcactaccagcataagttcacagaccagttctgtagttatagattgc

SEQ ID NO: 393 - DNA, 201 bp, Homo sapiens
  variation 101: note = n = T or C
  source 1..201: mol_type = genomic DNA
gagttcttaaataggccaccaagaccaccaccaccaccccattccccggctgaatggctttgtatacattatttatataaggataatgctagtttttttcngagagtagaaaaatgggattaatgtgaagatcaacactgaagctattttcatgagctcctggtatatataaaccacgtttatggcaattactttagaaat

SEQ ID NO: 394 - DNA, 201 bp, Homo sapiens
  variation 101: note = n = T or C
  source 1..201: mol_type = genomic DNA
agtcaccacagttgttcaggagcagctcaataacacaattagtgcagctttgtttttgaatattatataataagttggagaggctaagtgatattttccanagacttcagcatttgttcaataacttacgaaaattctatttggtctcactaagtgaaatagaagaaaaatatttttaccttcaaattttagctttgttta

SEQ ID NO: 395 - DNA, 201 bp, Homo sapiens
  variation 101: note = n = G or T
  source 1..201: mol_type = genomic DNA
ttgctagtgtgttttggtggttgtgtcttgttttcccctccacttctgacttgctgctctttaagtttgggttgccagaagagacaggtggtgcatgaagnttacttaaaacagtgccaattttagctctgcagcaaacatgggtcaaatcaagtggaaactgatgttaggatgggagagaagttgagagttagaaatggg

SEQ ID NO: 396 - DNA, 201 bp, Homo sapiens
  variation 101: note = n = C or A
  source 1..201: mol_type = genomic DNA
ataactggaaattccagatgaatttaggaaaaactagaagcaactaagaaatctcagaaccaatgtgaaatgtcaccttttcaaagtgaaatgttttattnggatgctggaagatttcatgctcaatggtcaggcagggatgcttttggtgaaatgaaagtccaaggagacaaaatagacttaggattggttttataaagg

SEQ ID NO: 397 - DNA, 201 bp, Homo sapiens
  variation 101: note = n = G or A
  source 1..201: mol_type = genomic DNA
atggtttaggggatgagagtgtatgaatagattttatacagctccattttttgagttatatatccattgaaagagaacttgctctgtaaaatccctgtaancaatgaactgtttattttagaatgagactctagggaataatctcataagaaacacatcttgcttttgtagaaaacccaagaggatagtattcattaagca

SEQ ID NO: 398 - DNA, 201 bp, Homo sapiens
  variation 101: note = n = A or G
  source 1..201: mol_type = genomic DNA
ttcttttggttacactttaacattatttcaattatggtcagtgtaaaagtagattcaaaagggtaaaaaatacagcttaaatgtctgcaagaccttgttcntaacattcatatgtcaaaaactgtatctccctatagtttgagtaacacgttaacctacttaccaccctgagttttcccagacgcaaggattttttagatt

SEQ ID NO: 399 - DNA, 201 bp, Homo sapiens
  variation 101: note = n = A or G
  source 1..201: mol_type = genomic DNA
atggttttcttcaaacaagacataagataaactttgagaataaaaaaattcttgagaaaaattgctaacagacatgttaaaaggtctttagaagtgtcagnaaaattgagaaatgtccagaaaatagagcaaaagtaaaaacagacaggactttgagaatttttatgttcagaaagactgtcaatggagtgtgaagattta

SEQ ID NO: 400 - DNA, 201 bp, Homo sapiens
  variation 101: note = n = G or A
  source 1..201: mol_type = genomic DNA
aactctaaaattgctttcaaaataacaatttattccgaattgtttttcttgttaataagtttttttgatgcttataaaaatattttatgataaatgttganaagggtacatttctagtgtgacttcttcatgatttgttactcttccaccccaataagaaattaaactctaatttcctaataatctctatcagctctttat

SEQ ID NO: 401 - DNA, 201 bp, Homo sapiens
  variation 101: note = n = T or C
  source 1..201: mol_type = genomic DNA
gtttttactgtaccctcacatactgtgtctgtgtgcacagtgactggcactgtttgcctctctgcagattgactcatgaggggtggaggtcctatacacangatggaatgtgtgccaaggctcaatctccatcgtccagatttggttgttaaatgactcaacaaaattatttacccatatattggaccctatgctatgttc

SEQ ID NO: 402 - DNA, 201 bp, Homo sapiens
  variation 101: note = n = T or C
  source 1..201: mol_type = genomic DNA
catctattttttaggaaaagaatatgacattattatacaattataattaagatggatataaatgaactcctgaattctttatgtcattcactgcaagccancacttacttgacacaatggcccaatttttttattaattaaacaatgtgcttgctaacaggatgggagacagttttcatcatgatatttctaggatggctg

SEQ ID NO: 403 - DNA, 201 bp, Homo sapiens
  variation 101: note = n = G or A
  source 1..201: mol_type = genomic DNA
cttgtagttgtgtagactgtccttacatgaaagcaaagcttaggctgaacacctgcctcaagtataagcaaaagtttgcattattttattcgagtggaaantttaccgtctttgccatttactttttggagacaccagaagagaaatatttattacatgtaagaagaaaattttgtctggcaaaatggtctttactagcac

SEQ ID NO: 404 - DNA, 201 bp, Homo sapiens
  variation 101: note = n = G or C
  source 1..201: mol_type = genomic DNA
cagtttggaagctctatatgatgacatttaatgccaaacaattgagttataaaacaaaaataaaaatattttaggaaattaaaatgagtgcttttgtaagnctgtattatccaagagaaaaagaatgaacaaaataagttacctgatgattgaaataaagtagctattggtttagtggacatagtaaaaaagaaattaaga

SEQ ID NO: 405 - DNA, 201 bp, Homo sapiens
  variation 101: note = n = G or A
  source 1..201: mol_type = genomic DNA
cttatgtaaccaaataccatctgtaccccaataacctatggaaaaaaatttttcagaaaaaaaaatgaaagctccctcaaggattcagagcaactagattntggaaacacaagttaaaaaccttgaaatccaggcctgaaagagtgaggtcaagggacagagtggggagagagcaaaggtgtcccctgcaacaccaccacc

SEQ ID NO: 406 - DNA, 201 bp, Homo sapiens
  variation 101: note = n = C or T
  source 1..201: mol_type = genomic DNA
tttattgacgatacatggagttaatgaatttctacaacaattaagaatagcataatctttttatagtcttactcttaatatgtgatttttccaatgaaacnatttaattattatttcatttatattaattttatttgtatttaggtataatgtacaatttatttatagactctaagcctaagaaatactacaatatctgaa

SEQ ID NO: 407 - DNA, 201 bp, Homo sapiens
  variation 101: note = n = T or C
  source 1..201: mol_type = genomic DNA
ctctggattgcatatgccttcacagagtcatattgtatccgggacatttttagcatcttctttggtggattttgtccttacaggagaaggatgctgaaccntcagatatcaggccagcattcccaaaagaaagaaggaagaatggtgaaaggcaaaggatcaaagaaataggtttgtaacttttttaagagctttccttga

SEQ ID NO: 408 - DNA, 201 bp, Homo sapiens
  variation 101: note = n = A or G
  source 1..201: mol_type = genomic DNA
gctcactgcagcttccaaccctcttgccttagccttccaagtacgtgggactacaggcttgagccactgtttccagctagcatatggttttctaaccaatntttaacttcagtttaatgttgtaaaccatactaaattcagagtattcttaatgcaatgggaaatattaatctactaatcaatacccagcttccctgccat

SEQ ID NO: 409 - DNA, 201 bp, Homo sapiens
  variation 101: note = n = A or G
  source 1..201: mol_type = genomic DNA
atatggtttgactattgtcccttagtatattcaatatttcaggcacttgctaagaactttgaggtgggggaaaatgataagttgaaaagagcaggaggganatatgttaattgtagctcaacatacctgactttaacaaattaaattatatatgttagttttatgattgtctccagaaaatttcaacagtttttatgtgag

SEQ ID NO: 410 - DNA, 201 bp, Homo sapiens
  variation 101: note = n = T or C
  source 1..201: mol_type = genomic DNA
atgaatgtagtttatacaatgagctccacgacgcgaactccaaggttaggcagtgcagggcctgagcagatctttcaccacaggaacaaacattttttctntctcagtaggtaaaacagggccctgtctgctgggcagctcacttccaatagggagaaaagagaggaagggccctgaacacacatgctaattctccccctt

SEQ ID NO: 411 - DNA, 201 bp, Homo sapiens
  variation 101: note = n = G or T
  source 1..201: mol_type = genomic DNA
ttacttatatttctaagaatcaagagataaaagttggaaaagccagatttttgaaataatttgcatatttctctacgatcttgtattcatcatatgcagangtattagctatccatcattctccaaagatctgcacacatttaagtcgatgcacttttaattttactactgtgaattcaaactatccttttgaatgctact

SEQ ID NO: 412 - DNA, 201 bp, Homo sapiens
  variation 101: note = n = T or C
  source 1..201: mol_type = genomic DNA
ttgttgcaggagctcaccatgtagcagtaatccctttgtaagaacaaggaagccatgcacctccagctgtgatagaaataggattggagaagagttcctcngccagctcaccttttcattgttagcatgccatttattataataaattactttaagaggcacattttacagtatcacttctgcttgttttacttgatcttc

SEQ ID NO: 413 - DNA, 201 bp, Homo sapiens
  variation 101: note = n = G or A
  source 1..201: mol_type = genomic DNA
ttcctgtgccataaaaatgtatggatttcattgttttaatatgccatatttctgagaaacacagtgtacttaggttcctagaacagaaatgatcattagtntgagtctaatttagttccctgctaaaggtgataaaggcagctcatttattcttcctagtaaagaagtccttttattgtttcaaagtcttctcatgatctt

SEQ ID NO: 414 - DNA, 201 bp, Homo sapiens
  variation 101: note = n = A or G
  source 1..201: mol_type = genomic DNA
ttcctcacagctctgagaccaacagggatgccatcttggctcctaaaagaaggaaaagctgtgattctatttcagaatcttttgctgaaacttgctcaaancagtctccatttgtaaaatgtcattaaaataatcttgtttgcattaaataatgatatcagaaagagcatagctattcatagtacaggcttcaggtataat

SEQ ID NO: 415 - DNA, 201 bp, Homo sapiens
  variation 101: note = n = G or A
  source 1..201: mol_type = genomic DNA
tgaatgtgacgatcttttactatgttgtagcaaagagttcagatctaaagataaaacttcttcaagacaaaaaaccagtgtcctgactgcaaaagagaggnagaatctgcttccagctactaaacaaaagagaggaagtcccagttctgttttattaaaagactttttatccacaaaatactgcagaattaatataaatgg

SEQ ID NO: 416 - DNA, 201 bp, Homo sapiens
  variation 101: note = n = A or C
  source 1..201: mol_type = genomic DNA
ccacacactgttctaacagtactactcttaggcctaggcacccctgtggggcaaagcatgtgtggggcaagcggccgtgccctatcagagcctgcacaaancctcctcaaatccagcaccacccctgccttcttgcccatcctccagaccttgctactctctccccaaatgaccctaagccactttcagttccagcatggc

SEQ ID NO: 417 - DNA, 201 bp, Homo sapiens
  variation 101: note = n = G or A
  source 1..201: mol_type = genomic DNA
attgaattgaattagatctaccccctcttgatcttggcatttttcaaagtcatgaataaagcactttgctggggcagaatgagatttctgctttccaaacntgacttgtgaagggctagaagacaacatgccaggattaacatcatatttaagaagtctacttattattgttcgcatttcctgtgtcatggatttagcagt

SEQ ID NO: 418 - DNA, 201 bp, Homo sapiens
  variation 101: note = n = A or G
  source 1..201: mol_type = genomic DNA
tcccatgactatttgtgggcaagttaacttttttccaggttttattttaatgaaaggatcccatcctggctttctgataccaaattttatcccatcgctgncatcaaaactccagttcttggatttatatatggttcaaagaccttggcaggtagccacagggtttcaaatattacctttaagtctgtgggttttcttttt

SEQ ID NO: 419 - DNA, 201 bp, Homo sapiens
  variation 101: note = n = G or A
  source 1..201: mol_type = genomic DNA
acatgaactacctgtgtatgggtccttgttcaggagtcaagaaagaggcacatgcagattatctttgctggtggcattctgttgcatggacatatcggganatgagggagcagggaaggttgtctcagcagtcaagaacttactctagtctcagtttttctaggactggactatgcaagaagtctattaaggaacacaaaa

SEQ ID NO: 420 - DNA, 201 bp, Homo sapiens
  variation 101: note = n = A or C
  source 1..201: mol_type = genomic DNA
ctaaaatggcatgcacataaaatattattaagaataaaagatgagaaaaggcttctggacttgaatttgaggagacagatcatcactgactttcaaataanatttcagtcaaatggtgtctttctccatgcctattttgcttttagtaccacagaaaatctgcattgcaccatatcaaaagaacaaaagaataactgattc

SEQ ID NO: 421 - DNA, 201 bp, Homo sapiens
  variation 101: note = n = A or G
  source 1..201: mol_type = genomic DNA
gacccttgtgaagtgccatagacgtggattggacaggacaaccactgcccagccccagccaaacttcaattctaatgtgagataaaaactaagcaggtgancaggctcacaccgggggtcagacaaagggtgcagagttttgaagaaaatgggggctaagatgggggattatacgcagcacccatttctctggaagcctct

SEQ ID NO: 422 - DNA, 201 bp, Homo sapiens
  variation 101: note = n = C or G
  source 1..201: mol_type = genomic DNA
ctaaatagtcagttctggaaatgactccagtggccatgaaatttagacttgagcaaggctcatcaaggctgtgttttacgagaggatcagaggatctgagnctggcatcagcacatgagcatggctgggcaatgttccccttttgtactccctgcttgaagatacagtgaagtagtctgtgctttagcgacagagaaaaca

SEQ ID NO: 423 - DNA, 201 bp, Homo sapiens
  variation 101: note = n = G or A
  source 1..201: mol_type = genomic DNA
gttaacactttgaaacgcagtacagtggtttgaccatcagcagcaatgtcagctgtgaccatcggggtgagagatggtagcagattcagagacaagattancccaaaatgggaagaatgggattttcgagaaggtgcctggcaaggctggtccgccaaaggctcttctttttgtttgtttgtttgtttgttgttattgttg

SEQ ID NO: 424 - DNA, 201 bp, Homo sapiens
  variation 101: note = n = C or T
  source 1..201: mol_type = genomic DNA
caggtggcaaaaagaaaggagaaactggaaagagagaatgtgtgtgtgagtggagagttgaacttctttttcttgtgctggcttatcacatctgtccattnctcaggctgcaaaactcaccagagttaacagagaagccttctcttaggcaagttccctcaagttacgtaagatagagcaaagctttttatttacttcccc

SEQ ID NO: 425 - DNA, 201 bp, Homo sapiens
  variation 101: note = n = T or C
  source 1..201: mol_type = genomic DNA
gctctataaaacaccttctaccagataatccacatttactcactagtaaataattattttcccatgtttattaatcaagggtatttaattttccattaggngaatacagctaatattaccggaagaggttgatggaactgcagtactaatgaagaaagcctgacccattagcttttatgtctcgctataaacaactacatt

SEQ ID NO: 426 - DNA, 201 bp, Homo sapiens
  variation 101: note = n = T or G
  source 1..201: mol_type = genomic DNA
tttactagctgctgaatgcagtaaggttgctagcaacagagcagaaagagctaggctgtttgctaatgcacttgggctgtactgtaactacgcaaggcagngctagtggcggtggagtcaataaacatgcagttctctggctttgagggttatttgttttactgagccaatatgttttttctagttaacatttttctgtag

SEQ ID NO: 427 - DNA, 201 bp, Homo sapiens
  variation 101: note = n = A or G
  source 1..201: mol_type = genomic DNA
tgtaactacgcaaggcagtgctagtggcggtggagtcaataaacatgcagttctctggctttgagggttatttgttttactgagccaatatgttttttctngttaacatttttctgtagtgttttcgcctgtgtgtgaaaggcttgtaaatacacttgaaggtgctggggaaggaaaaggtattgccaacttcatattggt

SEQ ID NO: 428 - DNA, 201 bp, Homo sapiens
  variation 101: note = n = A or G
  source 1..201: mol_type = genomic DNA
atctgcttctttccccgtgaaacccaaacatgcggagcttgcatgtcttttgagatatggcagaactgaacttaaaacctgggctttttcgggtgtgaggncccttatctttagtagcccccaaataactcttaaaatggccggaaaatctaatttcttcttattatgacctaccccagttttgtcacatgttttatgttt

SEQ ID NO: 429 - DNA, 201 bp, Homo sapiens
  variation 101: note = n = A or G
  source 1..201: mol_type = genomic DNA
acaaacttatggggtcatgcagggatggagagcaggttatattatttttagagatctgacaattctgatttataaagaaaaccttaaataatctagttcantttagataggaaattcctggggtaagttggggtaaggatatatgtcttcctttatttcctcggctctatccaacggcttgtgggatccatttgcctccat

SEQ ID NO: 430 - DNA, 201 bp, Homo sapiens
  variation 101: note = n = C or A
  source 1..201: mol_type = genomic DNA
aagtagcatctgtacacacttcattttaattgaatttggtgttcaaatagaaaataaaagtgagttctatcaaaagacatgaactcttagtctatatgagncccaaaataaggctaatgcccttttcactgtttactatatgttttgaggctatttaaaaacaggcgatattatttcttatctatgcaaatggaacagtag

SEQ ID NO: 431 - DNA, 201 bp, Homo sapiens
  variation 101: note = n = T or C
  source 1..201: mol_type = genomic DNA
ccaggaaaggccattggggcccaccctgttgagtgcagtgggaggagagacaagcaggcaaagctagtattcattcccctacaccaggggatggccaacgntgtcctagactgtaagggtgataatacctgtaacatctattcccagggtagtgggaaaattaggggtgccattgttcaaattatgagtgccattgttcaa

SEQ ID NO: 432 - DNA, 201 bp, Homo sapiens
  variation 101: note = n = C or G
  source 1..201: mol_type = genomic DNA
gaaaaccttccctgtcttttcctgtcagtcaaatattcctgccaatttccattattggaaggcagtagcacatttacagtcaagacacttccctatgcttnttttagcaattctgtggcacatgtttggaatttacatttttcgtatctccgactttatagaagctcaccaaggaaatacaaggtgcccaaatagctgtca

SEQ ID NO: 433 - DNA, 201 bp, Homo sapiens
  variation 101: note = n = C or T
  source 1..201: mol_type = genomic DNA
attatggttaatgaaatctctggtgccaagagaaacagagtaaaatgcacttaaggcatatagccaactccagccccagcagctgacttcccgccatccanacaggccacctctggcagaaggaccagcctgaacaaaatcccactactgagtctggttccccctagccctccagttctctcagcctcacacctcctttcc

SEQ ID NO: 434 - DNA, 201 bp, Homo sapiens
  variation 101: note = n = C or T
  source 1..201: mol_type = genomic DNA
ttaaagaacttgaaccctgtgggaaaagcactgcaggagaagtgtaagtattgggtgatggttgaggtcagccaagcacagcatcatggtatcaggaaatnagcaactgagacttcacatgctaagactgcatgacaaaatgagaagatagatggcccatgtttggtggtgaagggggtgaagttagtgtttataatacaa

SEQ ID NO: 435 - DNA, 201 bp, Homo sapiens
  variation 101: note = n = T or C
  source 1..201: mol_type = genomic DNA
gcctttcagctcctaccaatagagaagaagagattttgagggccacaactgacgtagaggaaaagtggtctctgggcaggggggtctttccaataaggctnggaaaacagggtttcacccacacacaccatgttgtaaaaaggtgccatgttttgcttctctgtttcccaaccctaccccatccccagccatctttcgttg

SEQ ID NO: 436 - DNA, 201 bp, Homo sapiens
  variation 101: note = n = G or C
  source 1..201: mol_type = genomic DNA
gctgaggctgggagcttacatcttcattaacccacagaaacggctctggaataaaatgctggggtgggcgctccttaacgtcaacatctgtgaggacgagnccccctccttctaactccgtgtgccacactttgccccttgctggctctggtgctgaggaagttggaaaaacaggaaggaaaagagcagatcaatttcata

SEQ ID NO: 437 - DNA, 201 bp, Homo sapiens
  variation 101: note = n = G or A
  source 1..201: mol_type = genomic DNA
gaaagaagaactaggtcagggcaggcaaggacagatgccctaatgtcttgggtgaggccacctcctggaaactagaaacccgagtgttgggtgcccaaatnttaaaacacaagagctcccgttaaataactctgactagacagatgtgagtcaataggtcaaaaaggatcaagagccatagagttgaatatactcagagcc

SEQ ID NO: 438 - DNA, 201 bp, Homo sapiens
  variation 101: note = n = T or C
  source 1..201: mol_type = genomic DNA
ggagtgagctaccagcctgtatcaaatgtgccctatttatttggcaagttctgctgataaacaaccttgtccgctctctcctgctgaggaattcctgatangaactgtcaaacatccacatccttcctgtaatccacctcctgtgtgaagcagagatttcttctggaagtaaagccaaccttgccatctcggctgccaggt

SEQ ID NO: 439 - DNA, 201 bp, Homo sapiens
  variation 101: note = n = A or T
  source 1..201: mol_type = genomic DNA
tctaataaatctttacctataactgccttggtaaattcctttacatcccgtgacactggctccggatccttgctatccttgacaaaagcaacttcttaganattatcaaacacagagattaatagacatacataccctgactacagtaccaatgcagaggaaaaggtggaataaggatttaaccctgctgcaaaatacaag

SEQ ID NO: 440 - DNA, 201 bp, Homo sapiens; identical to SEQ ID NO: 439
  variation 101: note = n = A or G
  source 1..201: mol_type = genomic DNA

SEQ ID NO: 441 - DNA, 201 bp, Homo sapiens
  variation 101: note = n = T or G
  source 1..201: mol_type = genomic DNA
caggtgaattcactgcccaacctaagcactaccacaccatgaatgctagtctgttctccagcactccttcctagttccattctgtttctctctgatttgtnagtttattacttttatatttaaaaaaaagtatttctaccacatacgcatgtatccttaaataacatttgtttagtcacttcaattttgtttagtattcag

SEQ ID NO: 442 - DNA, 201 bp, Homo sapiens
  variation 101: note = n = T or C
  source 1..201: mol_type = genomic DNA
aatggccagagagactgttggagttttaaaaatatccctttagaccaacttgtgcatgaaacgaactggaagaacaaagaaaacaaagctttggtaaatgngaaaccccctcaacctctctactactcaggtatggttttaaaatgtcatactggaaacagctcaagaacaaaggctgcctctacccaagtaaaagaagtg

SEQ ID NO: 443 - DNA, 201 bp, Homo sapiens
  variation 101: note = n = C or T
  source 1..201: mol_type = genomic DNA
cacatcaccagaatcagatcatacagatgcattatcagtaggtcatggcttcatgcagaccctgattccattttcagttctgatttttgcttgtgttcatnatgattccttcccgaactcaccagtacagaactcagaccttctctatgtttagctctacctgagtgatgggctgaaatgatctcagtgggactctgggca

SEQ ID NO: 444 - DNA, 201 bp, Homo sapiens
  variation 101: note = n = G or A
  source 1..201: mol_type = genomic DNA
aaagcctatagaaaagagaaatcaatggccacaccaagaatttggtctaactgggtataaatggagccatttacctaaacatgagtgaagtgcagggtgantgtgccgtcggtggaacttattgaattattttattataaggattgtggcagaacagtaaagatgttggccacgctccttcaagtctcaagctcactggat

SEQ ID NO: 445 - DNA, 201 bp, Homo sapiens
  variation 101: note = n = G or C
  source 1..201: mol_type = genomic DNA
acgttttgaaaatacatgtatgttgatatttatatatttaatacattgctccatagtattatctaattttctaccagaaccacctggaaatatgcactctnaaagcatacggaaaccgaataagtgagaaggaaaatcaattcagtgtcacctaatctttcactataaagagtaaagtgagttatatttaatatacaatat

SEQ ID NO: 446 - DNA, 201 bp, Homo sapiens
  variation 101: note = n = C or T
  source 1..201: mol_type = genomic DNA
aggaatcttgccaaacctgttctataaacagtgaagagtcacatttgccagctctaggcctttaaatatccttcccttgatatggataaaatgtttttaangttgtcctatggagatgaataggaatgatgaaattatctgcagatttagcatcaatttgcaaaaacaaagtattggaatgtttttgctggtcatgtatcc

SEQ ID NO: 447 - DNA, 201 bp, Homo sapiens
  variation 101: note = n = T or C
  source 1..201: mol_type = genomic DNA
aaacttgctacacatgttttaaaggacttcaactccttttggctgaaaattctggaagaaagaaattattggcataaccatgaccatccagaaaacgttgntgatgcaatggctcatgcaatttggaatattttctagtggtccctgttgactaatttgatcttactaagtaattcaataccacttgaacatattgtagtg

SEQ ID NO: 448 - DNA, 201 bp, Homo sapiens
  variation 101: note = n = T or G
  source 1..201: mol_type = genomic DNA
gttataagatggttttataattttacatttttattttatactatttcttatatttatttatgaagggataattcttctgccttcagtttagtttaaacctngttttgcttatgacatataatacagtgttatctctaaatgatttactgatttgtctttttaaaaatatttctaacctttatataagaaacaaaaataaat

SEQ ID NO: 449 - DNA, 201 bp, Homo sapiens
  variation 101: note = n = A or T
  source 1..201: mol_type = genomic DNA
taaccccagttttatagtttaacattttctttttctaccctattccgtggggactggattctctaactattcattaattatcaactctactaacaagcaangcttttcaaagtttagcttggttcttataatagtctgttcttgtcttgctataaagaaatacctagactgggtaattcataaagaaaataggtttgattg

SEQ ID NO: 450 - DNA, 201 bp, Homo sapiens
  variation 101: note = n = G or T
  source 1..201: mol_type = genomic DNA
atgctgaagggctctaatttcttccttgattaaacttttgctatgataataatgaaaaattattttaattatgagaaaacttcatccacaaggatttgatntctttcttattgtgatctttattgcctctctggatcactccaacacgtttttgccatgtcctagttaaatgttttcttttcctgaaatggaaattaacgt

SEQ ID NO: 451 - DNA, 201 bp, Homo sapiens
  variation 101: note = n = G or C
  source 1..201: mol_type = genomic DNA
aattatgttagaccttgaggtttaaaaatgagtgagataaccccacaatgaatgtcatccagaaaggccaaacatataatagattgcatattaacgaatgnatgttaagtgaaaagatacaaatatgccctcacatgagactgcataggggaggtgttagcagcagtgaatccatacaggtatgcagcaactcaattatag

SEQ ID NO: 452 - DNA, 201 bp, Homo sapiens
  variation 101: note = n = G or A
  source 1..201: mol_type = genomic DNA
aaaaaaaaagaaaagaagaaaaaacagaagcagttttaaggcctgaggaataaatacaaagacagtgtaagaaagaagctgaagtttcccatggcttaggngaattaaatgcattgtgttagggggctacatgtttatgcttactccaccccaaattcatttatttaaatcttaactcctgctctgatggtagtaggcagt

SEQ ID NO: 453 - DNA, 201 bp, Homo sapiens
  variation 101: note = n = C or G
  source 1..201: mol_type = genomic DNA
aaccaagagaggtcatcaattttgtgagcttagctatgacttagtgacttagttcacaaagtgaaagtactgaaaaaaaaaaaagccttcagaagcgagancaacattgtcatctagtcctataccttgatactgaatcttattataatacagttgaccattgaacaacatggggttgacctacacaagttcacttacaca

SEQ ID NO: 454 - DNA, 201 bp, Homo sapiens
  variation 101: note = n = A or G
  source 1..201: mol_type = genomic DNA
ggtgaaaccttgattctatcctacagaaagaggaactattaaatatttttgaaaaataaaaatgtaacaggacaaaaatggtggataaaaatcaatgggtngtaatgtggatcacaggttacataaaagagaggacctaaatgaagtgattttaaaaataaacagctctttgtgccttatttatattttttcaagtcaaaa

SEQ ID NO: 455 - DNA, 201 bp, Homo sapiens
  variation 101: note = n = T or C
  source 1..201: mol_type = genomic DNA
gtgtgtgtgtatttgcatatgggcaactgcatatgaatgtgtacctgcatcaaaattaattcctaacactgccataatctaagcagtaattttactactangttttgcatcttgttgcttccacttccagactctctcttttgcttgtttcatgctagactaatcaactgggaggggagaaaggatgaaagatgtggtatc

SEQ ID NO: 456 - DNA, 201 bp, Homo sapiens
  variation 101: note = n = T or C
  source 1..201: mol_type = genomic DNA
tctagtcctccactcgtttgaacagtcatgcatgatgctgttaggagacctggagatgcagagtattgaagtccagaataaaattggaagtaatattgccnttgctccaaaatacaggttgaaaaattcaagaaaactcacagcattctactcattaatattgctaataacttctcatctatttcgtatcctacttcagaa

SEQ ID NO: 457 - DNA, 201 bp, Homo sapiens
  variation 101: note = n = G or A
  source 1..201: mol_type = genomic DNA
gtgcctttggggagctcagattgtcaagagatgggttaactaagcagttgatcccgtgtggcagttgtcacagtggtgggaaagatggagcagtatcttangatctgagaaacaccacctcagtgcggctagggggcaggatgtgtcaaggaagtttagtcaagtatggaaatgcgacacaaaggtcaggaaaagataaag

SEQ ID NO: 458 - DNA, 201 bp, Homo sapiens
  variation 101: note = n = G or A
  source 1..201: mol_type = genomic DNA
tctgtctaagcacacaaagaatgctcaggaaagacactggtaccctgagaatggccaggaatgagggcttgaacacagaaagactttagagtttacactcntagctaaagtctctcctaaccatgagtgcctctctactgctctcccagcactgtatttatggacagaagagctgtgctctctcctaaggataatcaggat

SEQ ID NO: 459 - DNA, 201 bp, Homo sapiens
  variation 101: note = n = G or A
  source 1..201: mol_type = genomic DNA
caggctatcacctgtgaatcttcacactgggaaggttttcctacccagttttaatggctgttttcagaactattgacatttaccaagtcaagggcaatctntcttttaaagaagtgccaaaatagccttgcacttgggtcccaaacgtgctgggaaggtggattaacgttataggaggagaggaggcacagaaagtagagg

SEQ ID NO: 460 - DNA, 201 bp, Homo sapiens
  variation 101: note = n = C or T
  source 1..201: mol_type = genomic DNA
gtgcactttacacactttaatgtgtgtatcttgtacctcaataagataaaaaatatgtaatgctccagttttcattggtttggccaaagtacctcatctgncttactactgcatatagaaatccaagtgctctacaaatataaagcatttatattcgttacctatattgccagtgtgaagtaaaagattggacagttattt

SEQ ID NO: 461 - DNA, 201 bp, Homo sapiens
  variation 101: note = n = A or T
  source 1..201: mol_type = genomic DNA
caataactcagggcctcagggacactgaggtaattaacacttgacagtgtgacaattcctgcagaggtgtaattgcagccctctcattttcagcattgcangatccctaattggagattatgggcagtggtttctggaccattctcctctcccctcttaaagtgagcacactttcttatcagtgattttagcagatgtcct

SEQ ID NO: 462 - DNA, 201 bp, Homo sapiens
  variation 101: note = n = G or A
  source 1..201: mol_type = genomic DNA
aatgtgtatagcatggtttgttattggaaagcacattgccatattgtgcacattttaggaaattgataagttcacaggtaaaagacaataacttcttcccntttaaaaagtaggaaatagctttccaattagcaaattgcctaaaatgtgggcaaaacatctgatttttaaaaacagattacagatattaggtaacagatg

SEQ ID NO: 463 - DNA, 201 bp, Homo sapiens
  variation 101: note = n = C or G
  source 1..201: mol_type = genomic DNA
gcaccggataatagctaatttcttcatttttatttgcctatttgtttcaaattatgttgagtggtgtcaaaacaggatattgtttgggcaaacacagaagncagttcatctgctgctcttcgtgagttccttgccctgctctctctgcttgtggagatcagtgtccggttatctacacacatcatggcaggttgcttatga

SEQ ID NO: 464 - DNA, 201 bp, Homo sapiens
  variation 101: note = n = C or T
  source 1..201: mol_type = genomic DNA
atgtttataagctagtctttctgaagacaaaaacactaagcaagaaggcttacagtaagaaaaaacacatttatttattcattgaataagtagcatgcacngttccaaatagtagagatgtaaatcccctcactttaaatggaacttagattttagtgggggtcagggaggtgctggtggtggaggtgctggagacacaca

SEQ ID NO: 465 - DNA, 201 bp, Homo sapiens
  variation 101: note = n = A or C
  source 1..201: mol_type = genomic DNA
cttttataagatcaccatgactccatgtgtgaagaatagattacagtgatggcactgtaatttggtctatattttatgacatgtgacatagagtaaaacanactaatcagataaaacaaggccaaaataactggaattattcaaacgttatgtcgtcacaccaactggagaaagaaaaatcacaaaaaaagctggttgaaa

SEQ ID NO: 466 - DNA, 201 bp, Homo sapiens
  variation 101: note = n = C or A
  source 1..201: mol_type = genomic DNA
aagaggaggtgctaatggtcccccaatattcaaggagactaaatctatgaaacttcaattattaccataaataggacctagcattacctctggactaatgntacgtggaagagttctaattactcatacatgttagataactaaaaacatatacatcaacagtgattatgtctatattttctgaaatttctacaatgagtt

SEQ ID NO: 467 - DNA, 201 bp, Homo sapiens
  variation 101: note = n = T or C
  source 1..201: mol_type = genomic DNA
ccttctcagtctatccctgcccacactcacttccagaagcaatgactattccgatgtttctttactaccataaatgtgggttgttgagttttgaaattacngtatttatatcaagaatcggtagaatgaggtcctaacactcaattaccaatttggttctggtttgcttctgtagcttgttgcttctctgttgcactgaca

SEQ ID NO: 468 - DNA, 201 bp, Homo sapiens
  variation 101: note = n = T or C
  source 1..201: mol_type = genomic DNA
caaaaaaagagtatgagcctatctgcagggtttttttggggggtaaaacagaggaagaaaaaaactaccatcactaaggtttaaaatctggttttctcaantacaccctgagttcttattcaacatacaagttaatcctgtgtggctgagaacacagttggagaagttagcaaaatatactttggagtcagataaggttgt

SEQ ID NO: 469 - DNA, 201 bp, Homo sapiens
  variation 101: note = n = C or T
  source 1..201: mol_type = genomic DNA
agcaggacttttgaatggattaaatgagaaaatatatgaaaaaactctaggtactataaaacactacataaaattgtgagttattgaaatttttatgatgngaagtaccttcaatgaacaagattactgaggagttttcaaatagttgtctaaggcttctctgctctgtggttagagctttgggggaaggaaggttaattc

SEQ ID NO: 470 - DNA, 201 bp, Homo sapiens
  variation 101: note = n = A or G
  source 1..201: mol_type = genomic DNA
ttcatgcatagctgctaatagacatgaggggcaagcactatttttaaaaaatcacatttcaggagcctcatgtgggtcataaaacacatattcaccttgcntgcttccctctgtcttctacattcaatagcacgaacatatttttgttactctaactataaaaatgtatgtggatggttgcacactgaagttttagtttat

SEQ ID NO: 471 - DNA, 201 bp, Homo sapiens
  variation 101: note = n = A or C
  source 1..201: mol_type = genomic DNA
gcaggagattggaatttatatggaaaaaatctgagttaaagagtcttatgaagggagatctgggaaacattctgttcatggtgtacatacaaattgaagtnggagaaactggtggagaacattttcagaaaattccttctttcaatgaatgtcactgaaaagagcatgaaggttgagtgcagctttgtcccgggattcctg

SEQ ID NO: 472 - DNA, 201 bp, Homo sapiens
  variation 101: note = n = G or T
  source 1..201: mol_type = genomic DNA
gaaactttccaagattacacagcaaacaaactgaggagcacaagattcaaataggccactgtttttggtcaacagattggtttagaaactgtttattgttnatttctcttagacatagttttcactcacaataactctgtggtattcatggtctttgattttccttttattcatttatgtggaaattctggcctctatttc

SEQ ID NO: 473 - DNA, 201 bp, Homo sapiens
  variation 101: note = n = C or T
  source 1..201: mol_type = genomic DNA
ctcccagtctggttttcctctagacaaagaggctgcctggttcaacatgcctgacagcatggttttacaatcgtgtacttgattttcactggcatagtcanacccataagttctcaagctcagagacttggttcaaccattcttttgacagcccaccagccacttaacattccattatttttcctctggcacacaaacttc

SEQ ID NO: 474 - DNA, 201 bp, Homo sapiens
  variation 101: note = n = C or T
  source 1..201: mol_type = genomic DNA
tctaaaattctttcttgtcatttatttggattactgatttttgaattttcttttcatttttgtcaaaatcatgaaagaagagattttcctcattggaacanatactttattatgctaaaatattcctttggagaaaccgatcactagaatcctttagtgattctgagatttcactgcacattagaatcacctggaggactt

SEQ ID NO: 475 - DNA, 201 bp, Homo sapiens
  variation 101: note = n = C or G
  source 1..201: mol_type = genomic DNA
gatattgagatggcatttgattagcaaaattgtaaagttaaggtgaattcatgatccgcacttaaaaattaagatgaaaaacagattttaaaaaatgcttnctgtgtaatggattatctcaggatttggcaataacttgatatatgagacagatattgtaataattaaccccacacaaattgaggcaatgggcattctgag

SEQ ID NO: 476 - DNA, 201 bp, Homo sapiens
  variation 101: note = n = G or T
  source 1..201: mol_type = genomic DNA
tctgaaaatgggaaccatttccctcatctttgccctgcagacacctagagatgcacatgtaaatgcgtcactccttatacacatgaaacacgttcagtacnagcaaacagggggaggcatctctggcaaaaacaagccctaattctccatgagtttccacctttttttccgtttctcttgttcttatcctccttgtcactt

SEQ ID NO: 477 - DNA, 201 bp, Homo sapiens
  variation 101: note = n = A or G
  source 1..201: mol_type = genomic DNA
caaaatttatactataaaaattacaatgattaacagacagataccatcaatacactaatacataaaacatcaggaattgatacaatgtcttcatataatgntaccacaatctaacacaaaagacctggtgataaacaataagataatttcttaattttttataataggtaattacatgcttgatatatatgatacctgatg

SEQ ID NO: 478 - DNA, 201 bp, Homo sapiens
  variation 101: note = n = C or T
  source 1..201: mol_type = genomic DNA
tttaacgcgggaaaattttacattgttgtataagacatgcttataaattcacatgaaaacttaatactacaacttaataagtggtgggtttttatataccnaattgaggaaatgcagtgtattgtaacctatacagccctatcacaataaaattgggagccaaatggcctttgttacaatgttgattgcctgaatttattt

SEQ ID NO: 479 - DNA, 201 bp, Homo sapiens
  variation 101: note = n = C or A
  source 1..201: mol_type = genomic DNA
tcggaaaggctagtaacagagttattcattttttccttgttttccttcaccactcattgttggggaaaagagaacctctgaacttaatattacagtaagcnagtttccccagatcacaacgtaatgatggttaatagcaaatgctcacctattagaaagtgaccaagtgaatatacactggtataataaactatatgtata

SEQ ID NO: 480 - DNA, 201 bp, Homo sapiens
  variation 101: note = n = C or T
  source 1..201: mol_type = genomic DNA
ggttttaaataaaacatttattttaaacatttcgtggaaaatccaattttgatgttatggcactgacacctagatatgtgcagctattccataccaaatgntttcttcccgaatgtcaacatgtcctgtgtttgtaaaagtattatttaatataactaaaataaaaccatcatttcaaacaatgaactctgagaatgcgtg

SEQ ID NO: 481 - DNA, 201 bp, Homo sapiens
  variation 101: note = n = G or A
  source 1..201: mol_type = genomic DNA
caataaaatgaagtgtgcctgtaaagggcttgagaattacatgaacacaggtcaaagaaaatggaaatctttagaaacagatgagaataagtgggtagatnttgctatggcttaattggttgtctcttctaaaactcatgttaaaattcagctgtctttgtaacagtgttaaaaagtgggacctcgaaggggtgattaggc

SEQ ID NO: 482 - DNA, 201 bp, Homo sapiens
  variation 101: note = n = T or C
  source 1..201: mol_type = genomic DNA
agaagtgacccactaatttgtatcttaagcaagaaaaattgtttcaggccaactgagatttaattcctctatgatgcatattcttttggtaaatagttcancatcttgtaactgtcaactatttgtatgttatatattagctattttgacagcaactatagttctctacataattctttttttttttaattttttttttgt

SEQ ID NO: 483 - DNA, 201 bp, Homo sapiens
  variation 101: note = n = G or A
  source 1..201: mol_type = genomic DNA
tagcagcaacacatcacgatgccctggctaaaagctgtgtccaactccttatcttgtccttgctgcccccacccaggctattgttgcacaagtcaaggaanaataagatgctggctcagccttagcaccttgccactgcccaccacattcagaaggccattagagtcaggcagtgagtgggacaggtgcctaggtgggagt

SEQ ID NO: 484 - DNA, 201 bp, Homo sapiens
  variation 101: note = n = T or C
  source 1..201: mol_type = genomic DNA
atgtttagttcttgctcatattacatgtctcttacaggtctatagctctaaaaatttctaagtagcacccaggataaaggcagtgcctttacctggtattnaaaggtaatgtagcaaagagaaagaaaatataactcagagatatacccagaaagtggaacaagttacttttattcacattttatagaataaaacaagttg

SEQ ID NO: 485 - DNA, 201 bp, Homo sapiens
  variation 101: note = n = A or G
  source 1..201: mol_type = genomic DNA
aactgttgttttatttgccttagtcccatcttaaaaccagctcaaaaatttcactttttcccttgttgagttctccccacattcccattgcttttccccanttggtttttattctcactttcacctctacttctgtactacttaatcttaggctcaaagtcaaggtcttaaaaaaaaaatctgagttcactggactaaact

SEQ ID NO: 486 - DNA, 201 bp, Homo sapiens
  variation 101: note = n = A or G
  source 1..201: mol_type = genomic DNA
atctttttttaatggaataagattttggtggaggtcaatacaggctcacactgcagtgaaatctctagaatatcacaacacacacaacacagtaaaataanactaaaattctcaaaaatctccattcaaatccacatgatcaaaactgaaaacactgataacattaggatagaaatgtggcaagacgtatcttcaaagtaa

SEQ ID NO: 487 - DNA, 201 bp, Homo sapiens
  variation 101: note = n = G or T
  source 1..201: mol_type = genomic DNA
tatgggaactacaattcaagatgagatatgagtggggacacagccaaaccatatcagatctctatacaagggaaatattctgcaggatgagaaatgccaangaataaaaaatgaaactagtagtaatgtagatatttatgtccttaacaatttttctattttaaaaggctcaaagaaatattaaagataggtagacatttc

SEQ ID NO: 488 - DNA, 201 bp, Homo sapiens
  variation 101: note = n = T or C
  source 1..201: mol_type = genomic DNA
ttcagtcagtgagttaaaaaaattagcacaaatgcccagtaggaacattagacactgaatgaatataagccttgcaattttcaatatcttcttatctaatntgatagtatcttttcatccactggtggttggcataaatctcagactataacttgggcataaaagaggaatccctttattttctattaccatttaatttct

SEQ ID NO: 489 - DNA, 201 bp, Homo sapiens
  variation 101: note = n = G or T
  source 1..201: mol_type = genomic DNA
agtaatgtaatttagaacaggcttgaaagaatgttctcctggtacatcataccaaactgtcttttcaataaaaaagacatatggcattaattataagatgnttatgtgaaaggtacatgttaattttcatatgaaagaacctgcataaaatagttttatgactactatcatcattattataatgcctccaagatactcccc

SEQ ID NO: 490 - DNA, 201 bp, Homo sapiens
  variation 101: note = n = C or T
  source 1..201: mol_type = genomic DNA
tctgtttggagtattttcaataaaataccacctccaattctctcaaaagtaattaaaagaaaggtagaaaagtacttgtacctactcgaataacatttttngtgtcactttataagctcgtttctacatgtttttctgctttatgtttagatgcaaaatcttgactctttacaagtttaccattttagggtcttctcattg

SEQ ID NO: 491 - DNA, 201 bp, Homo sapiens
  variation 101: note = n = G or A
  source 1..201: mol_type = genomic DNA
ttcttccttttggggagacagagtagacatgaggaactagaagtcaatctcatgagtctatgacttagtcccttctccatgtcatcttcttatccaaatcnggcaactgcatctaacaagtgacagaaaacactcacagaagaggtagtcaccgagtaaatcatttaatcactccaagctttgatttcttcagttaaaaaa

SEQ ID NO: 492 - DNA, 201 bp, Homo sapiens
  variation 101: note = n = T or C
  source 1..201: mol_type = genomic DNA
acacaatttctgtgaatccatgctctgatgatttcccccatctacagactttcagcatgtccttcaagacttatgatgtaataagaataaagcaggaagantaagaacaaaaattgtgctggaaagaaatctatgagaaatgaatttcaggttttctggagagttctgattgaatgactgcactatattattagagtagtt

SEQ ID NO: 493 - DNA, 201 bp, Homo sapiens
  variation 101: note = n = A or G
  source 1..201: mol_type = genomic DNA
ctgaacctcccaggaagatacgtctctattattctgagaaggctattattgaaattagttaagaaaaccacttatctccctattatttaaaaatctgtcantgtaaagatggatggcattactcagaatcagaaaatttgaattccaacacttgattatgaaacttggtagctgtggggggcggggcaaagatggctgact

SEQ ID NO: 494 - DNA, 201 bp, Homo sapiens
  variation 101: note = n = A or C
  source 1..201: mol_type = genomic DNA
gggtgcactctctgcacgttacggtcacacagttcagaggaaattctatgctatcttgcatctgcacctctatgtccatcttctctttctcgacttaaganaatcagcttcctggaccccctttacctccattcacctttcacaactttcactcgttttgtgagacagttcaattatcactttcaggattgtgtctgtttc

SEQ ID NO: 495 - DNA, 201 bp, Homo sapiens
  variation 101: note = n = A or G
  source 1..201: mol_type = genomic DNA
agtttttgtgtaaaataattttttcaaatttcagaaaaaaatatgcttatgaaagaagctttagaatgcaacctgcactgttcatgaccaaacatgtatcngtatagagggcatgagagcagaaataaacagaaataaatattcacctccacagggtagccctaaggatcctatgcccagataactagcttgtgagttatt

SEQ ID NO: 496 - DNA, 201 bp, Homo sapiens
  variation 101: note = n = T or C
  source 1..201: mol_type = genomic DNA
tatttatttctgtaaaaactcgttcaaacccatattactattgaggggtgggtaagggggctatgttaagactgcatgtcattggccacccactcctccgnctgattcaggattggacgtccagcccaaggagcaccaagctttaactggccaggaatttatacatgtttctcaatcaataatttattccagaagacacag

SEQ ID NO: 497 - DNA, 201 bp, Homo sapiens
  variation 101: note = n = G or A
  source 1..201: mol_type = genomic DNA
atctttaatgctaatgaaggtacgtccataataagttttgctgatcaaaattaattttacacatagaggaaataagaggcaaagcaatctttattaaatgncagagaattaaatcctttgaatgatgttacagaggctgccaaggtagcatgagcaatcactaagttgtatgattattggtttcttgggcaagaggagtgt

SEQ ID NO: 498 - DNA, 201 bp, Homo sapiens
  variation 101: note = n = T or C
  source 1..201: mol_type = genomic DNA
aaaatttcttataaggcacagcaaattcatatttaaagaaacaaaatagcagcttttctctctttaacataaatttaatgtggagacccttccttatgttncaaatgctgattatgggaaacattgtttattccagatgaggtagtgtgatgttatttcatccatcagagagacagcaggcccctttcagagctctaggat

SEQ ID NO: 499 - DNA, 201 bp, Homo sapiens
  variation 101: note = n = G or A
  source 1..201: mol_type = genomic DNA
aaaaaaaagcagagattagtcctcattagcatgtaaaggcaattctttcaacttctcaacagaaaactcaagaacaactctcgatttatggattggaactntggatgttggatgtgagaagactgacaaagaacacagggatctgatatgagagaaaaatctgttaacttgccaatcttcccctatcttctgtgatgctgt

SEQ ID NO: 500 - DNA, 201 bp, Homo sapiens
  variation 101: note = n = G or A
  source 1..201: mol_type = genomic DNA
gagccagagataaactgctacagtccagctattatgtatggactgccttgaggttttgtatgtgggttcaatgtgtgtgtatgactgggattcatctgccnaagtcattactagccataaataaacaggaaaaaactgtttacttactcctctgatttccagtcagaattatgatgctgtatcattttcctgtgcactaat

SEQ ID NO: 501 - DNA, 201 bp, Homo sapiens
  variation 101: note = n = T or C
  source 1..201: mol_type = genomic DNA
tggatatccatccaggttctctctgagtcaaccttgtgctctaccttcacggaagcatttagttttcacacaggacaggaaaacaaatgagtctgtgtttntaaaggtgtagcaatagaaataaatctgtcctcgggcaaatatcccttatccttttctgtgacgtgctcttctgtgggtttgcctgtacttgccttttat

SEQ ID NO: 502 - DNA, 201 bp, Homo sapiens
  variation 101: note = n = C or A
  source 1..201: mol_type = genomic DNA
tgaactattgacccactaatatatcaagagattatgttatgactaacatatatccaaagttcaatttaactctttctttactggccaatattgcagtaaantttctaggactaaatcctttacttctttttcaaggactggttagctttagatgttatatgaaaagtagcaaatgcataaatgtctgaacattgtttatac

SEQ ID NO: 503 - DNA, 201 bp, Homo sapiens
  variation 101: note = n = A or G
  source 1..201: mol_type = genomic DNA
cagaaccagatctaaaatctgcaccctgaggctgcaaaaactcagtttccgttttgttgctacaggaaaacagcacaagggaagtactggcaagaagtganactggtcagtgcatctgccatccctgggtgctgtcttggtgagaccccatcagtcctctccaccttgtgcactgatgctgaagactcccccctgaccaga

SEQ ID NO: 504 - DNA, 201 bp, Homo sapiens
  variation 101: note = n = T or C
  source 1..201: mol_type = genomic DNA
catgcaggaaaaagttgtgattagttaatctatggttctgttcttaaaatagcaacccctcaagaactctattttgggaagtgcaggctaaatagtcaagncctggagaaagcacaacatgcattagatttcttattaccagatcttctgcattgttgctaagtgttactgtcccttaaactgaaaaatgttttaatgatt

SEQ ID NO: 505 - DNA, 201 bp, Homo sapiens
  variation 101: note = n = A or G
  source 1..201: mol_type = genomic DNA
ccgcaagtccaacaacagctgtgtctgacagaagttaagtgatttgccaaaaataaaaaactgagaagtgacaagttaagaaacaaagaccacaagggttntggttaagaagtgacaacttaagaaacaaagaccctaggttaatcaacctagggttgattaacaagctttgattaagcacttactgcatgcaaagcagtg

SEQ ID NO: 506 - DNA, 201 bp, Homo sapiens
  variation 101: note = n = C or T
  source 1..201: mol_type = genomic DNA
tgctgaaaacagaaagggtgtgtctgccatgccaatcccagggaatgcattcttttctaggcagctgtcctttctctaatccagcgctcgtttctccaagnctatatctctcaggttatcatcaaggcttcgttcatgttcacttaatcgcacagtgccttcatggatttcatgctcaattaccatttgctaaattcttta

SEQ ID NO: 507 - DNA, 201 bp, Homo sapiens
  variation 101: note = n = C or T
  source 1..201: mol_type = genomic DNA
agctcactagtctctgcaaggaatgttgagacagggaaaaaagtgtgtgggtctgtatctaaacaaacatatatattttttacacttcgactatattcccntttctggttctgtctctgaatacaaatatatttagagatatattcatagagacatattagtatatatgtatctaatatgtaaaatgatgcaatttaaatt

SEQ ID NO: 508 - DNA, 201 bp, Homo sapiens
  variation 101: note = n = A or G
  source 1..201: mol_type = genomic DNA
tacccattagtgtatatcctgtaaggagtaaggacgccattctaagggtctaaaaagtgagactgagcgataaggagatgtcatgaagatgtgacttgacntgtgggttgaattactaacaatggcctgaagatacattttgatatatattatatgtgaattatatgtgatatatatataatatatattatatgatatata

SEQ ID NO: 509 - DNA, 201 bp, Homo sapiens
  variation 101: note = n = A or G
  source 1..201: mol_type = genomic DNA
gatgcttaaacagccccagttctcaccaagaaacaccaaggcccccatggccacctccctgttgtgtacaagctgggaggcaagctattgagattcttctncctggtaaccgctgcactggccaacttggctaaactagttctagtgtagatgcatctgagatatgacattcaaagagaaggcttgaaatacagacattct

SEQ ID NO: 510 - DNA, 201 bp, Homo sapiens
  variation 101: note = n = G or A
  source 1..201: mol_type = genomic DNA
caaacttgtatgcctctttttcatttaatagtgatcccaagaaaaatgttagtattctttcttttacacataaggaaccatatataggtagtaagaatacnattcaggattccaaaatccatgatcttttcatgtcttgactcagctggcattgagctgggagtacagagatgggtgcatgtcactatgagagtgtttaga

SEQ ID NO: 511 - DNA, 201 bp, Homo sapiens
  variation 101: note = n = C or G
  source 1..201: mol_type = genomic DNA
acagtgagtggtatacagtgatttctccaaaaatgtttcctaaaaagttgtggagctgcctgtccttacattttgtagcaattgccagatcattggctctnacagatcttgttcactttttaatataatatgaaatatctgtttatagtcatttaatttctatcaaacattaatgaaatgtattactaaaagaaaatgact

SEQ ID NO: 512 - DNA, 201 bp, Homo sapiens
  variation 101: note = n = T or C
  source 1..201: mol_type = genomic DNA
ggcagggtctggggactactagaatatgccactggaaaatcctaaattatctccccatggaacactgctggctgaagtacacacaacttgtattttcttcngcagtagcacagatgcatctgcctatttgcccagctgcttgcagttggaagaagctaagtctacatcgagagaaacacggctattttctgcagctaagtc

SEQ ID NO: 513 - DNA, 201 bp, Homo sapiens
  variation 101: note = n = G or C
  source 1..201: mol_type = genomic DNA
acacaccactgaattaggtgactctggtggcacctcaaagcaggtcccctcctcaagtaggttgtcactgcagatggacctgaggacatttttataagatngtttcgggctatcagcaagactcctttcctagcactttttttcatcacaactgccacactgttgatgtagatttcatgtactctgttcttgtacaatgta

SEQ ID NO: 514 - DNA, 201 bp, Homo sapiens
  variation 101: note = n = A or G
  source 1..201: mol_type = genomic DNA
gaaatctctgaagggaaagaaatgtatagaagacattcatcaatatcccttgattgcatttattgtttgtggtagcagaatccaacagtctacaactgacnttatctgacagactcctatgccctctgcacatgcaattgatgcaaagtaaaaactgcctttatgttcaaaataaaataaatcacctaagatgttcagatt

SEQ ID NO: 515 - DNA, 201 bp, Homo sapiens
  variation 101: note = n = G or A
  source 1..201: mol_type = genomic DNA
gaaaaatatgaccagatttgtaattttatccagaatctctgcagctagaaggtgttcagttaatgcacatgtttgaatatggtaatgtggattaacatgtnggagacacagagacaatccaacaaaaacattaatcagatccaaaatgtacatctctgcttcaaacaccagacaacaataaaggcattttaaaaggctcca

SEQ ID NO: 516 - DNA, 201 bp, Homo sapiens
  variation 101: note = n = A or G
  source 1..201: mol_type = genomic DNA
gcagatgcatacttaaaccttaacacaagtgaacctgcattatgctttaacacaaatgaagagtgaaccattatttcatgcattgacaaatactaaacacntcggccatgcactcagcagcaatgtgtggagtcttttgtctgatcacatcatatcacagctttgtattacagtatgtgactaacacatctttctttctgg

SEQ ID NO: 517 - DNA, 201 bp, Homo sapiens
  variation 101: note = n = G or T
  source 1..201: mol_type = genomic DNA
aatggatgattacagatgcccatgcagaagaatggagagaaatgggtattaggaaaatttcccatttggacattgatgtgatagatgtattactaaaaagncatggcagtagtgatgggcatggctaaaagcaacataaaaatacttagtaattgctcaattgcaaagagctgttgcaaaagataagaatacatggtttta

SEQ ID NO: 518 - DNA, 201 bp, Homo sapiens
  variation 101: note = n = G or T
  source 1..201: mol_type = genomic DNA
gtgctttctacttttgcaaatgtcctgttctgtggagagctgcataaaccaaatagctgacatgaaaaataacttaggggaaaaggagacatatactacgngcccagtgaagcagggagaaacttaggggccatggaatttcgagtaagactcacagactcacagagaggggaaaggggtggggggtaattcaggtcttgt

SEQ ID NO: 519 - DNA, 201 bp, Homo sapiens
  variation 101: note = n = G or A
  source 1..201: mol_type = genomic DNA
tatggctgagcattgggacactcattgggatcttttatgctaaaggattctaataggtgatcagcaaagtgaataaccaagcccagagaagcaacaggggnaaagaatgctgtgaggagtctgtaagcaaatgtgcagtggcaggaatttgcctatgaaagtcaaggaggaggagggaagccagcaagagtggaggaaaga

SEQ ID NO: 520 - DNA, 201 bp, Homo sapiens
  variation 101: note = n = G or A
  source 1..201: mol_type = genomic DNA
tttatgcaaaattttttaaaggagcagttagcatgatcctggcaggtgaagtgaaggcatgaggtgggagttggaggaaagtgactgatagatgaacatcnactataaaggaggcaacaaaatgcttgaatttgagaagtgtgctttgtatacatggaatgaggtctagacataagtattttatgatgcttcccagtaaat

SEQ ID NO: 521 - DNA, 201 bp, Homo sapiens
  variation 101: note = n = C or T
  source 1..201: mol_type = genomic DNA
cccatagccctttgagattaattttttagccatttctttcagattcaactgtgctttattgttcagattaagcactaaatcctgtttcctttgatccaaantgactcctattcatcagaattctggtcctccatcccccaggcttcatcatgtagaacttctctcagtttggtttgaaacccagatcctattatcccaaac

SEQ ID NO: 522 - DNA, 201 bp, Homo sapiens
  variation 101: note = n = G or T
  source 1..201: mol_type = genomic DNA
actgtttgcgaccccacaaattgaaaagtgactgaggaactatcaacaaagagaagatatcaccagcaaaatttgcagctggaaggaggctttaaaatgtnacactttgcagactcactcatctcttcattaatggcctgggaaagggaggaaatagccctttaatgcaatctttgaatgacatacaattggaagatgtca

SEQ ID NO: 523 - DNA, 201 bp, Homo sapiens
  variation 101: note = n = C or T
  source 1..201: mol_type = genomic DNA
agccggaagcactcttagcagatccagactgtgaatgtaggtgtatcacaggtattggaagaagagagatgctaggggcacattcagaattctatggtgantggagaaaaaggactggctctgagctaggtcccaaaataaaaatagtagaaacaactcaatacgtacactggaaaagtgaaaattcagatagcctgcaag

SEQ ID NO: 524 - DNA, 201 bp, Homo sapiens
  variation 101: note = n = A or T
  source 1..201: mol_type = genomic DNA
cctcttcggacagcgttcaactctcccagccgcacttcttccctgaatgctttttaatctggcatgatccacaaataaaggaaattgtggttttcacatcntgatggaggttatttttccactgtgaataataaaagcagagtatcccatttgtagcttcgaaaggttcccattccaacccgcattatttattcctcaggc

SEQ ID NO: 525 - DNA, 201 bp, Homo sapiens
  variation 101: note = n = A or G
  source 1..201: mol_type = genomic DNA
ggtttcacagttcttagagattcattcatttattaactcattcagacctttagacacaattccttacatgtctatgccagatactgaagatagaatggcanataccctatcctatccgccagtgaggatcttgctatctggtgatcattctgggtaagagttctttcttcagagaaggaaatcaggcagccagtcctggat

SEQ ID NO: 526 - DNA, 201 bp, Homo sapiens
  variation 101: note = n = T or G
  source 1..201: mol_type = genomic DNA
tgaacaaagcacgacagagaagggagactgggaatgcacaaggagaggaagagaacacagcccacacggtctgccagatctcgcccagctgggaagctatntgaccagcctggactctgtcctctgaactctccagcactgagtcaacctattgtacccctggcttgatcctcattagatgcactgaagatctcgcaacca

SEQ ID NO: 527 - DNA, 201 bp, Homo sapiens
  variation 101: note = n = C or T
  source 1..201: mol_type = genomic DNA
tgaggctggagtgttaagataggcaagctctaagttactcaaccctctccgaaagtcacgatcagaggtgaagagccacaagaatagcgcttggaaatgcngcaattgggaagtcatctaccaaacatcctcaggagaggggtcgccttcagcagaagcacagcaacaaaacagagcacgaaatgtggagtcagagaagag

SEQ ID NO: 528 - DNA, 201 bp, Homo sapiens
  variation 101: note = n = A or G
  source 1..201: mol_type = genomic DNA
tagattatggaacccatgcagactgcacgcctactgtcacattggaccaaaagagaattgggatccatagaaagagggagaatggagataagacgttaagnataagacaggtactcaaaaatgggaaaggggtcagtaggttgctgaggagatgggaaataaagagagctctggaaggagaaaaagttaatgagaaacaaa

SEQ ID NO: 529 - DNA, 201 bp, Homo sapiens
  variation 101: note = n = T or C
  source 1..201: mol_type = genomic DNA
gctccacttctccatcttgtcaataacagcgtctatttctgcacacaaagaaacttgtttaataaagcagatataactctttaggggttggagtgtgtggnttttgttgcccccaaatcagctgcataacaaaaagaaaggctggtattttaggtgacgagtgaaaaatgggtcaggcagctctctgatttcataggaacc

SEQ ID NO: 530 - DNA, 201 bp, Homo sapiens
  variation 101: note = n = T or G
  source 1..201: mol_type = genomic DNA
gcttttacttaattcatcatttccaatctgctgagggtcccatgccttggggctttcttaaaggtcaggtctgattaggtgggaacagcaagaagcaaaantgaggactctggctttcctgccttcgttatctactccagtgtcctttacagaaaccgtttacattcattatttgtgtcttcctcacattttgttcaattt

SEQ ID NO: 531 - DNA, 201 bp, Homo sapiens
  variation 101: note = n = T or G
  source 1..201: mol_type = genomic DNA
aatgtgtgtctctgagaaagttgcttaattctgagtaatggtttacttagctttaaagtgagggaggctacttgtgaagtttgaaatgacaaatgtgtctntatcagttatctgaaaaaaaatggacattaccatctcagcttttggcagctagcatgaggttggagaaggtgggttggataagcaatcagccctatcgcc

SEQ ID NO: 532 - DNA, 201 bp, Homo sapiens
  variation 101: note = n = G or T
  source 1..201: mol_type = genomic DNA
aaacaaggacaagtcttaaagttttaagactctaagtatttgaactttaaacaagccttaaaagttctaagtattaggtcaagtgaaacaataccagtttncccaaagcatgaagagaaggaaacgagaccatctctaataagaaagtgataagttggaagaatggacagagacactgataaagatgattcattttcttga

SEQ ID NO: 533 - DNA, 201 bp, Homo sapiens
  variation 101: note = n = A or G
  source 1..201: mol_type = genomic DNA
tagtttctttcctcatttatgtaatatatcttttattaactatttactttgggtagtctggcctacaactgtttgacttggtgggctttgattaacattcntatgaccaaacagaaccagtgttgaaagtgtgtgatggaatagcattccaggtgatcgagctaaattgtgagaagctagacgtgttaaacatgaaaggga

SEQ ID NO: 534 - DNA, 201 bp, Homo sapiens
  variation 101: note = n = A or C
  source 1..201: mol_type = genomic DNA
ttcagtctagtgaagttcaccaaaaaggctttccacaattattcagaaactcattctagatctctttttactctttattgtgaactgagtctctgagaccntattccaatcataattccaacccttagcttaattaactgatgttaaatatatccatatggaattaaatgactgtctctatgctgctataacaaaatactc

SEQ ID NO: 535 - DNA, 201 bp, Homo sapiens
  variation 101: note = n = C or T
  source 1..201: mol_type = genomic DNA
cagatacatacaataatattcaaaatacttataaggtctcactgaagcaagattcatggaccttcacttactaatccttgaaatagaaggtttaaaaatantgagagcaggccgggcgtggtgactcatgcctgtaatcccagcactttgggaggccaaggcgggcggatcacctgaggtcaggagttcaagaccagcctg

SEQ ID NO: 536 - DNA, 201 bp, Homo sapiens
  variation 101: note = n = T or A
  source 1..201: mol_type = genomic DNA
tccataacaataggtagtacatttgtgagttctaattctttaaatgctcaatgtttctgcaggttttacggtgccattgaagaggacttttcacgtgggantcctggataattatgacaatatgtttgctataatctttttttttttttttttttttgagacaaggtcttactctgttttccagcctggaatgcagtgaca

SEQ ID NO: 537 - DNA, 201 bp, Homo sapiens
  variation 101: note = n = A or T
  source 1..201: mol_type = genomic DNA
aagtttgatgtaactcagcaccttctttcttttcccaaagtataataatgtagccaaatgtttaatacattaatgttttgaagaatctcggtttcacatantgcagcttattgccttctactatttctttcttctccatatcatcccgtccagattaccaacagaagctccatttctaaaaatttgtctccctatcatgca

SEQ ID NO: 538 - DNA, 201 bp, Homo sapiens
  variation 101: note = n = C or G
  source 1..201: mol_type = genomic DNA
tccagaatcatgagcaaatgaatttctgtttatcatgaattacccagtctgtggtatcctgttatagtagcacagaccaaactaaggtagtaagagtgtantaatacttttccatatttactgaatcctaacactcctttgttacttccccttttgcaaaatgacctctcccactttacgaaacaaaggcattccccttac

SEQ ID NO: 539 - DNA, 201 bp, Homo sapiens
  variation 101: note = n = T or A
  source 1..201: mol_type = genomic DNA
ctaactctgactatagaaagagactgaagaggagctctttcatatatatatatatgttaagtatcttttaaaatgtataccctagttctgataactggacntgttgactgcttaaatgctataaatgaccaatttctaagtagtcttaggatctaatatgctgtaatgatgcctaattttttcttcagaaaatttactgaa

SEQ ID NO: 540 - DNA, 201 bp, Homo sapiens
  variation 101: note = n = G or A
  source 1..201: mol_type = genomic DNA
ttgcttttttccttaaagtcttagatggtttataaaatctaaatattttaataaacatgaatgcacataaataatgcttgtacacatgtatatgcatgtcnaaattagcaataaattaaggatataaataattagaatgaaatttaggacgaggttaaaatctcatacattggaattatatgcttagaggaccagtataat

SEQ ID NO: 541 - DNA, 201 bp, Homo sapiens
  variation 101: note = n = G or A
  source 1..201: mol_type = genomic DNA
aacacataagaggaatggaagaagaggagagactattattgtttttcaacataaaatttgatatcaaagccaaacataattttcttgcaaaatttgatccngaatttacagttatgtgaatttaagcacagacatagttaccaggatgctctttatagcactgtttcaatatattaaaacatttacagcaatagaaaagat

SEQ ID NO: 542 - DNA, 201 bp, Homo sapiens
  variation 101: note = n = C or A
  source 1..201: mol_type = genomic DNA
gaggagctaatagaggagcaaggataaacaaggtatgggattccagaaggttgtcaaactggtacgaaaattcaagtttcttaatttctggtctaatacanacagatgggatagagataggaataggaaggggtttatggagggaaataggagaatatggaggggatagggagaggaatatggagggggacagaaaaaggg

SEQ ID NO: 543 - DNA, 201 bp, Homo sapiens
  source 1..201: mol_type = genomic DNA
  variation 101: note = n = G or A
gtcaatgtcttggtgtttttcaatgaaaataatttctaagtattaataaattatatattttttgcaattgcttagaaatataatgagtgcatggatacatntatgaaatggaaaaataaattttattttgtgcagttacagctaagctatcttattaatacagcataaatcagtaacagttataacattacaaatgtttaa

SEQ ID NO: 544 - DNA, 201 bp, Homo sapiens
  variation 101: note = n = C or T
  source 1..201: mol_type = genomic DNA
gtgtctctcccacaacatgagggaattatgggggctataattcaagaagagatttgggtggggacacaggaaaaccatatcatatgtcctactaaaatgcngtggtatctgaaattctttgttatatattctgcttcagacaactttggatatattccttttttttaaccacattctactctattcactttcaacatagag

SEQ ID NO: 545 - DNA, 201 bp, Homo sapiens
  variation 101: note = n = T or C
  source 1..201: mol_type = genomic DNA
aaaacatatctgcaagataatattctggattatggtgcccaggacaatgccccccatctatgtgacttatttaccccaaatagagttttataaccactaanaaaactctgtcattgttcatggaaaatatgcatgaaaatttaattgatcaatacccaaaatgaagtgctttaggtacaatgcaatgttgcatgtattact

SEQ ID NO: 546 - DNA, 201 bp, Homo sapiens
  variation 101: note = n = A or G
  source 1..201: mol_type = genomic DNA
actcaaattcctagattggttacagcctggaattaaatcaccaatgtgatcacggaaatgcaaacactacctgaacattatgcaagcccccagaggagcancttttttttggtaaatcctgtacattgctttcagtaagttacaaatcctgtgccatgtttatgcaaacacagcagatggctatacaaatgaattatatgt

SEQ ID NO: 547 - DNA, 201 bp, Homo sapiens
  variation 101: note = n = T or C
  source 1..201: mol_type = genomic DNA
gaggactgctgatgggatccttgcaaaccttttcctgtcaaaattaagattacaattttactgcctgcatggggtgaagataaagggctcatgcttccttnactaatgctagacgttcagaaacagtttgaggtatacgtttatatttttggccaaagtattgacaattctttgtaatttctataaagcagaatgtgttca

SEQ ID NO: 548 - DNA, 201 bp, Homo sapiens
  variation 101: note = n = T or C
  source 1..201: mol_type = genomic DNA
gtgctctgttcactgattttctgatttggaaacaagttttcttgggcaggaaaaggatgcttcagaggacatgatactttagagaagctccttcagctttngtagcccatttgcgaacaacataacacattgggatactgtatttcatcaattctaaatatattttcccactactacctggcagtatacctatatttctta

SEQ ID NO: 549 - DNA, 201 bp, Homo sapiens
  variation 101: note = n = G or A
  source 1..201: mol_type = genomic DNA
gataaatgtctgtttaaaacatccattctctctgtaattataaatacttctgtgataaccctcatcaattttaggacaccacatgaaacatccttggtctnctttactgattattccctcagttcccatccttcgttccttaaatttagcagcctgtcatggaccctgatatcttcttaaatagctattttgagcactgac

SEQ ID NO: 550 - DNA, 201 bp, Homo sapiens
  variation 101: note = n = C or T
  source 1..201: mol_type = genomic DNA
caggcagtgtagacaccatataaaaggtttattctaattctaccctctttctcttatcgaattgctatttttcacttaacttatctatatcctgtaattgnccactagagatggaatattccccaacttacaatgggactaagacccaataaacccattgtaagttgaaaacatagtaagttgaaaatgcatttaatatac

SEQ ID NO: 551 - DNA, 201 bp, Homo sapiens
  variation 101: note = n = T or C
  source 1..201: mol_type = genomic DNA
gaattgtcacgagtttcgggaccaccaaggatttaatagggaaccaaaccatcagataacaaagagatggcaatgaatgaatgactgtctaagtaactaantccttcacgtattcccatgccattctacaggcccaaaaatcttttacaaaattgcctataattcagtatgtctgaaggcattgctcaagatttttcatcg

SEQ ID NO: 552 - DNA, 201 bp, Homo sapiens
  variation 101: note = n = C or T
  source 1..201: mol_type = genomic DNA
ttattgttactatcttttttatctaataaaattgtggtcaaaaataaatgcaacaccatctgtacaatgattgatctagcatgtgtttatttacttggggntccaacaacaggaattatttaaatgtaagttaggaataaagggagttagtacttacttcctagcaaaaacaaattctgttaattttaggatggctatatc

SEQ ID NO: 553 - DNA, 201 bp, Homo sapiens
  variation 101: note = n = C or A
  source 1..201: mol_type = genomic DNA
tcagtgaaaaatcaactaattgagctaatagtagttaggcaactccttttctcccctgattcatttcatactcccagaaccaattacaataatgaggaatnagatggaactgggaaggtgtgagtgcataaaatgttagcgtttctattatgggattttcttactatgcctgtcctatacccattctctttagtaagaccc

SEQ ID NO: 554 - DNA, 201 bp, Homo sapiens
  variation 101: note = n = T or G
  source 1..201: mol_type = genomic DNA
tgattgtcaaaaatgcatagtagtatgctccaaggatcaatcttgttgtaccctgaaaagaatagtaccaatattggcttcttgtacagatactattcatntattgcacaatgattcatcaataacaggtgatatcatatttatggaatatttatgttgcttaagttggattctctttttaatgacacagaggtggtaaat

SEQ ID NO: 555 - DNA, 201 bp, Homo sapiens
  variation 101: note = n = A or G
  source 1..201: mol_type = genomic DNA
gacaaattagttgtgtttgtgtcttttatgaaaaatgtaataaatttcccagaactcttattcaggagaattcccagaagtccattcagagttagttcctntatgcaacgcttggtgtaaagatataacacctaaggcctagccacgccgaagaattggtgcaggggctgaccgcagggagtgacagagacttggactgag

SEQ ID NO: 556 - DNA, 201 bp, Homo sapiens
  variation 101: note = n = C or T
  source 1..201: mol_type = genomic DNA
caagcttcgtttatttacatcacatgtaaaatgagcataataatccaatctaattcattgagttggatgaggattacaaagaatttattatggtaactggnccagtttgacttccataaaaattagtttttattatgagaatgctaatttatagatggatattaagactaaataacaaacttggaaatgtatatgaaggct

SEQ ID NO: 557 - DNA, 201 bp, Homo sapiens
  variation 101: note = n = T or C
  source 1..201: mol_type = genomic DNA
agccacttagctggtaagcggcaaaaacaggatttaaatcatgtttatctcattctaaatttaaagagacttaagggctggtcagctgcatattaagctcnaggtatgtgccttgctttcttcatctattgaatgggaataaaataacacatcacagaattgctttgaagactacgtaaggtagagcaggaaaagtggtaa

SEQ ID NO: 558 - DNA, 201 bp, Homo sapiens
  variation 101: note = n = G or C
  source 1..201: mol_type = genomic DNA
tgcatagaatgactaccatgtgcaagacacatcattacaaataaaagatttccttgtcttcaactttaagatatcttgtgactaaaactttccacaattanaatctatgttttcaacattcaataattagctatagttattccaaaactatttctagaacttgccatattgaagctttaaagttcaaatgaagtatttgaa

SEQ ID NO: 559 - DNA, 201 bp, Homo sapiens
  variation 101: note = n = G or A
  source 1..201: mol_type = genomic DNA
ctctgatagcagacttaagggtgacatttattttatttaaaaaaatcattttgaacaaagatttacttcctctctttaccaccacttccccatcacttaantcaattacattctgtctccaaaaaaatcagaaatctttcactagttctaaccgaatctaaagacgtcctcctattctaaatgtgtttattttaatcagtc

SEQ ID NO: 560 - DNA, 201 bp, Homo sapiens
  variation 101: note = n = C or A
  source 1..201: mol_type = genomic DNA
aatttcacactagagattattttacatagagtatagttctaattttgtgagttctaacaacatagaatagaatcccttaatgcctttaatcacttaatccntgtgacacccccacttccaggaatatctgattacctccatgatttatgtcttcttgcaaagcttaaccacagtagctggcacttcctcatctggcctcag

SEQ ID NO: 561 - DNA, 201 bp, Homo sapiens
  variation 101: note = n = T or C
  source 1..201: mol_type = genomic DNA
atttctttgtctctagtttaaaagaaatacaaggcagaaacacttagaagttctcctcaatttcctgcttggataatgagtttcttcacctagggaaatantcatttagaaaacttaagaatagaagaaagagaactgtgatcgaggaacaataagaaataaaacttcaaagattattttgatgcctgctattttattact

SEQ ID NO: 562 - DNA, 201 bp, Homo sapiens
  variation 101: note = n = T or C
  source 1..201: mol_type = genomic DNA
aattgtaactgcattctactttgtttattctttactttcaaaattatccatttcactatggtatttataaacatattccttttaatagccaacggcaacantaccttgagagagagaattaggaaacattctctttgtcagagctcaaaatgatatcctgcagagtgaaagagcacttttatacaatataaatacttaact

SEQ ID NO: 563 - DNA, 201 bp, Homo sapiens
  variation 101: note = n = A or G
  source 1..201: mol_type = genomic DNA
ttcacaggccattaattttaaattatcagcataccatggtatcttggggtgaaattccctgggctccttcagtgtaagttataagtaggttcagttgtatntaacagaaactccctaataacagttaacggatacatgcataaagggtcagcagttgtgaactgatatgattctgttttcagaaacccaggcttttactct

SEQ ID NO: 564 - DNA, 201 bp, Homo sapiens
  variation 101: note = n = G or A
  source 1..201: mol_type = genomic DNA
taatgttaccctaagtgaaaagaaaagcaagaacccaaatgtttcccccactcaaatcctgtaccaaaatacacaaatataaattattttttcctaaaacntctttcagtgaaccgcagttcagttcaaggtaaagactacctagcaatacaaaaatgagcatatacagtttatttcctaattcatcctgttacatgtttt

SEQ ID NO: 565 - DNA, 201 bp, Homo sapiens
  variation 101: note = n = C or T
  source 1..201: mol_type = genomic DNA
aaaatttaacaaatatctacactgaactctattatcgagtataaattaccttcttatagtgcattccaaggtacaactatctactgaggtttctgaggacncttaattatattttgacttatctatatgttgtatcatttacatacaaaattatattttgatagaacattacttgtttattatttatgaggttttgctaca

SEQ ID NO: 566 - DNA, 201 bp, Homo sapiens
  variation 101: note = n = T or C
  source 1..201: mol_type = genomic DNA
aagccctagagtcagcattttaaataagcgcctttggtgacctttatgcactttcatgtttatacacttctttggcacttttatccaaagccgtggaaacnccaaagacatctatcaagaacttgttcttcatatggcaaccatatggtattgcgatctttcttgtctaaatttacagatttaccattacagactcaaaat

SEQ ID NO: 567 - DNA, 201 bp, Homo sapiens
  variation 101: note = n = C or T
  source 1..201: mol_type = genomic DNA
ccttttctccccctcttcagcactcctttgcttcttttacagataacactttacagattggcttttcagatagtgggatgtagtcaacactgacacttttnatgatcgatcaaaccagtttcctttgttgctcactggcgacagggttagtgattttgctcacatcactgtcagacacagcattattgaagttttaaaaaa

SEQ ID NO: 568 - DNA, 201 bp, Homo sapiens
  variation 101: note = n = A or C
  source 1..201: mol_type = genomic DNA
taatctgactgatgtttctctgaaggcatacagtcaaaatcgaaggctacaaaccataatttgatttttagtaaaggtaaagatttggtaagtactatacngaaatacttaacatacttcatttcacctgcaaaaatgggtatgttttgtttatactctacctatgtctatgcaatgctatagttgaattaaattttgcaa

SEQ ID NO: 569 - DNA, 201 bp, Homo sapiens
  variation 101: note = n = G or A
  source 1..201: mol_type = genomic DNA
atcatgagccatgggtggattatatcatacacaaatatttggtcaaaacacacccatctcaaattatcctggagaccttaatctaagaaagtaagataaantctctttccccaaacctacagaatactactttaggtattctgagtcttctactttttaaatgaaacataggaaggtaaaaatattttttaaaataaagcc

SEQ ID NO: 570 - DNA, 201 bp, Homo sapiens
  variation 101: note = n = C or T
  source 1..201: mol_type = genomic DNA
agtaagagctcaggggctggttctgtgcccacccctcttcatccttgggtaaatgttctccttgcctccttgagattccaatctagaacagttagggtganttactctcataaggaacattctcaaaaggagtctaggtgattttatcattggctaatatattaaaaaatatgtgtgtgcttatgaattcatatcaaataa

SEQ ID NO: 571 - DNA, 201 bp, Homo sapiens
  variation 101: note = n = A or G
  source 1..201: mol_type = genomic DNA
agggaacgaaattgtttccttccctatactagctaaatattgggatatgccattaccaaatgttacaataatggcttacatttcactgtgtaccttagcantagaggaaaaagaagagaaaaggaaaatcatagtttttttttttttttttttttttttttttaaatggagtctccctctgttgcccaggctggagtgtag

SEQ ID NO: 572 - DNA, 201 bp, Homo sapiens
  variation 101: note = n = G or T
  source 1..201: mol_type = genomic DNA
ggatagactttaatgaaataataataaaaaaacactcccatatttctacccctttgtagacacaaaagcaaagtaacagtctgttatttcagtttccctgnctaacttgatcatatgatcatgaacttttattctctcctttcctcaacaggcgcaaaaatgctattaatagaataatatgggacagaaaagtggatgcta

SEQ ID NO: 573 - DNA, 201 bp, Homo sapiens
  variation 101: note = n = C or T
  source 1..201: mol_type = genomic DNA
cacactttggaatttggaggatgagttgtggagaataaaaaaaaaagtggtgggaagaaaacatttacttgtctgtgtttattctctgctgggtcttagtnggcaaagctacctttgtagtaggtcctcttttcttttatccttctttgttgttctttcaaacaaaatttggagatgttacccactttgtcccagtttctg

SEQ ID NO: 574 - DNA, 201 bp, Homo sapiens
  variation 101: note = n = G or A
  source 1..201: mol_type = genomic DNA
gtcacttctgcccatattccattggccaaaggatatgatattgtctagcccaatatcaattgaatgggaaagtattcttttcccatgtaggtggtttagtnggaatgaaattttgctgagcagttactatcttccacaagtagccaattagccttctaaacaggccaaatgagctgatatcatcatgctgttaatttaata

SEQ ID NO: 575 - DNA, 201 bp, Homo sapiens
  variation 101: note = n = C or G
  source 1..201: mol_type = genomic DNA
tgattttgtatttaaacatgctaaacacaatattttaatcagacagtgtcaacaatttttagataaattgagaaattaataaaatgcatatgctactgggngtgcttatagtataaaaataaagatagaagttttaaaaagcatagaacaaacaccaatatttatttcactatttaaaaaatactgactgtatgatgatga

SEQ ID NO: 576 - DNA, 201 bp, Homo sapiens
  variation 101: note = n = T or C
  source 1..201: mol_type = genomic DNA
gtataaaaataaagatagaagttttaaaaagcatagaacaaacaccaatatttatttcactatttaaaaaatactgactgtatgatgatgataatgataanaacagttttctacagataccacatttctgaggataagcaatgttaaaagaaaaactttagatcaattaaatttaacagaatttaattgagcaaaaaagga

SEQ ID NO: 577 - DNA, 201 bp, Homo sapiens
  variation 101: note = n = T or C
  source 1..201: mol_type = genomic DNA
ttgccccatgatatttataattaaattacattgtatattttggtataattgggttactggttgagttttgtaaaacaaatagaataaatattgcttattanagtttatcacacagtccaaataacagcgaattcacatactacattatgtagataatggaacaactaattcatgtggtctacaactgactttgtactacca

SEQ ID NO: 578 - DNA, 201 bp, Homo sapiens
  variation 101: note = n = C or A
  source 1..201: mol_type = genomic DNA
aaatattcatgctataaaattaattattaactgcgttatttaatgagaatacacaacttgtattttcctttagattttcaaagtactaaaactctatctangcaggtaagctttaatttgaaaaagctttagtgtttatattaactgctgttcacttctctgcctttattgccactgccaaattggtagaacaagttaaaa

SEQ ID NO: 579 - DNA, 201 bp, Homo sapiens
  variation 101: note = n = C or T
  source 1..201: mol_type = genomic DNA
actttatctgaaaaggtctttgccgcatgaatttgagaaagagaattaatcctgcatagtcgactgtagcttattatttttcactgtagttagtgagaaanttagtcaaacacaattttaatgagagctctttcctaagctttgcctctgttttatacaggtagtttttaaaattcttcacaaatgtaacctggccctact

SEQ ID NO: 580 - DNA, 201 bp, Homo sapiens
  variation 101: note = n = C or G
  source 1..201: mol_type = genomic DNA
catctattcaatcagttgagggacttacaattttatttttggtttatagagaacacatcaaatgaacctgtagaaccacttggcaaagtgatatataaccntaagaaagatagccaaattcacaattaaaagatgaaacaattctggataaaattaaacacaacacatgaagcaatgttaaattgtatattaataaactcc

SEQ ID NO: 581 - DNA, 201 bp, Homo sapiens
  variation 101: note = n = T or C
  source 1..201: mol_type = genomic DNA
cttgagtctcaaggcattcaagagttgggcaaagcacagtcatttacataggttacatcataaatgtgctccctggaaggataaaccacataggcactgcnttcaacatagacaatgtataacttttgtcttccagtcaaatagttctagttacagtatcaaattataaaacatctactgtatcttttatttgaattttct

SEQ ID NO: 582 - DNA, 201 bp, Homo sapiens
  variation 101: note = n = G or T
  source 1..201: mol_type = genomic DNA
gcttttctgcatatgttttaaccttcaaaaaataagatgagaagctcatttaaaaatcacttctaaaaatgcaaaaggaaaaatttcatagcagacgacantgcattttaatccttttcataagtccagtgattaatgggtctataagatacattatggagacctcacatatagctgaggggaaattaatggataaagaat

SEQ ID NO: 583 - DNA, 201 bp, Homo sapiens
  variation 101: note = n = C or T
  source 1..201: mol_type = genomic DNA
gaatttttttttcccctgagtgtaaatggaatatcaaacgagcacattttaaacatacaggattttggcaattgtgaagttttgttctggatgctcttgtncttaaattatattataatcatattagtaaagtgagccagtttgtactcaataccatactttattctttcttgccagtccttactaaattcagcctacgaa

SEQ ID NO: 584 - DNA, 201 bp, Homo sapiens
  variation 101: note = n = G or A
  source 1..201: mol_type = genomic DNA
ggctgaatgctgagattgagaaagtgcagcagctcccaccttagggaaaccacatcccagggttcttcacgcctgtgctgctgccgtgggtcagtttgatngtttttaaacttctaccctggcactccacctgttttagttaatgtatatatttggctgtaagttccatgaacccttccttaaagatggcttagcctcggg

SEQ ID NO: 585 - DNA, 201 bp, Homo sapiens
  variation 101: note = n = C or T
  source 1..201: mol_type = genomic DNA
aaagtccagcacaagtggatacagggtatatgtgagctcatatcttcaactttagggggcaatataaaataacaagaatttgatgattttaaaatgttgangaagacttctggaggtatggcagaaaaacatctgatttagtataatcccttttaactaaaaatttatgtgctatgggacaaaataaaggagaataaataa

SEQ ID NO: 586 - DNA, 201 bp, Homo sapiens
  variation 101: note = n = C or T
  source 1..201: mol_type = genomic DNA
ataattaaattttaaaactctggttaagacaattgttttgatgtctcctgagaggaatttttgccaaggttttcctaatactggcttctcactttttgttntcactcctaatagtctacattctaaaaaaaggagacttttttttttttgagattgagtcttgctctgttgtccaggctggagtacagtagtgcaacctcg

SEQ ID NO: 587 - DNA, 201 bp, Homo sapiens
  variation 101: note = n = G or A
  source 1..201: mol_type = genomic DNA
aaatatctgatgggaaatgaaaagccattatggctacctggtagcaagtccaattacaaatgactccagagccctctgcaatgtgacctgactctaaatcntcctttaggattgtcatccagtctgctggccctctgctttctgcctactcacatgtaattgggaaatggaaggtacttatctatcttgttgatggcactg

SEQ ID NO: 588 - DNA, 201 bp, Homo sapiens
  variation 101: note = n = C or G
  source 1..201: mol_type = genomic DNA
tgagacagagttgtagtggacatttttggttttatttattttatcacctgtcattcattcattttatgttaactgtacctctcttgccttgtggggaaacnaatcccatttttcagtcttgatccatacatgctcatggagttgtcatccctccatctggaatctccctctagaagtctcctgtgtctgggtctagctaaa

SEQ ID NO: 589 - DNA, 201 bp, Homo sapiens
  variation 101: note = n = C or T
  source 1..201: mol_type = genomic DNA
ccaacagaatattatgttgttctactttgacaataggaattttattacttcgtgcatatacaactacagtataaatgtgcttcttcattatagaacagtanttctttttaatcttattgaaaacatatcttaaagtccatctaatctgatcttgtttcttccattcgcatttgttcacaccagaaacttaagtctcactag

SEQ ID NO: 590 - DNA, 201 bp, Homo sapiens
  variation 101: note = n = T or C
  source 1..201: mol_type = genomic DNA
acgtttctttctttcttcataagcaactatttgggccataatagattggaatgctgaaacaataaaatatgcccaacactaaaaaaagaatgaaatatctngaaatacagctaactaaagtgccatttttacatttttatcaaatcgtaccaaagatatagacgatctccattattttttattttatttattttttttgag

SEQ ID NO: 591 - DNA, 201 bp, Homo sapiens
  variation 101: note = n = A or G
  source 1..201: mol_type = genomic DNA
attttttctgtcatattatccacaaggaagtcattacttgctaatgctcagagtggagtaacctagtcccagaattctgtgttatggtttgttttctgggnctactcatggtaaaaagaagtgcattagtaacgtcaattctgcagaacaaaagccactgtaagtatttaatacaggttgaacagataacgtaaggtgcag

SEQ ID NO: 592 - DNA, 201 bp, Homo sapiens
  variation 101: note = n = T or C
  source 1..201: mol_type = genomic DNA
gatactaacagttctggcacaaaatagatgctcaaaaagtatttctcgatcaaacaaaaatatgttgttttaatgtagtgacttgtacctgtgcagcattnccagtgatttgtttatagtaggccctgcatgtaatatacgatgttcctgttggcattttgtcattgcctttcttaataacttcagacttactttgcaaca

SEQ ID NO: 593 - DNA, 201 bp, Homo sapiens
  variation 101: note = n = G or A
  source 1..201: mol_type = genomic DNA
ttctgtattataagactgcatatatttgtgcaatataagccagtggtctcagccatatttagaagaacgtgcattgtttgcatttggcaatgtctgaaacnagacttaaccacaataagtccaagtgactatccttgagctcatagtacattactttatttactgcaggtttataaatacattgatataggttagattagg

SEQ ID NO: 594 - DNA, 201 bp, Homo sapiens
  variation 101: note = n = T or C
  source 1..201: mol_type = genomic DNA
ccatgatgtaaaaacaaacaaacaaaaaaacttcctgtggaatagtagtgatagtactacatggtatcagacatggtattattccatattattgagagagnttcaggtattattgatgaccattttttcctaggcagcaaccaattattcctgctgtgtcttcttgaggaagtcagcaactagccttgcatatccaatggg

SEQ ID NO: 595 - DNA, 201 bp, Homo sapiens
  variation 101: note = n = A or G
  source 1..201: mol_type = genomic DNA
agttttaagagtcatgacaactttttctttttaacacaatttctcttagaatcattaaagtcaattgctaataattgcattggcattgtgataacttgagntgtaaccaaggaaaagcatgttcaatatgggttactaattacactaataacaatttatgcaaattagtgactaattttacattagcatagtggtaatcac

SEQ ID NO: 596 - DNA, 201 bp, Homo sapiens
  variation 101: note = n = A or G
  source 1..201: mol_type = genomic DNA
cctgtgttatatccaatactaactcagatgaactaaaatactcaaatgtctcttaacctctacgttactctggcttcccagggagatgacagtattttagnggcacctgctagcatcaacattaaagtcatgtaattatgtttttcttttctttttttaaatttatacatatatatatttattatattttaagttctaggg

SEQ ID NO: 597 - DNA, 201 bp, Homo sapiens
  variation 101: note = n = C or T
  source 1..201: mol_type = genomic DNA
tccctcctgttctccatcagtgtccttatcttacattataccatattcgacctgtcaagatatttcaatatttcccacattaacaacaaagatatgtaaangacgatattacactgtcaaatcccctaaacatccctgtgtttcatttacaaattctcgagtcagtttgccgatgaattaacatttacaattatagttcct

SEQ ID NO: 598 - DNA, 201 bp, Homo sapiens
  variation 101: note = n = C or G
  source 1..201: mol_type = genomic DNA
aaacagaaaagaacttctaaagatgtaaatttaatatgttttctaagtattttattattcactaaattaaattcatgcctttaagtttctctctgaaaacncccatctttctttctttgcttcactgaacaccctacagcttcccaaagggaaaaataaataaaggctctaataatgagtagtttcccaaggcacatcttg

SEQ ID NO: 599 - DNA, 201 bp, Homo sapiens
  variation 101: note = n = C or A
  source 1..201: mol_type = genomic DNA
atccccaagttccactatgatcatcatataaatctttagatgccatttcaacttcacttttctagatcattttagataactatgtttctaaagcagaatanattactacttcctcatttccattaactgttttgcaagattttcaggttaaaatacaaaggcatgaactcggctcactgcagtctctgcctcccaggctca

SEQ ID NO: 600 - DNA, 201 bp, Homo sapiens
  variation 101: note = n = G or A
  source 1..201: mol_type = genomic DNA
tgatgattaaatttttggtatactatgaattttagatttcagaatttcaactgaggaattgtgaaacattttaacatgcttatgacacacaaacttatacnggcatatgtctatattttaatattcagactttgtatagccttatattcaaggtgtctttttttggaagcgacttatgtttcctgtttaatgctcagtctg

SEQ ID NO: 601 - DNA, 201 bp, Homo sapiens
  variation 101: note = n = C or G
  source 1..201: mol_type = genomic DNA
caagcaaaaaagcaacttagtaggaattggcattctagtcataaggagtctgtccatcctttctgaattccttttcttcatttattccctacaatccacanttcaccaacgtcatttcctgtcgtgtgattctgtggtgtctggataaactatattacagtttctggagaaagagtctcctgtttacacatcttcgtatca

SEQ ID NO: 602 - DNA, 201 bp, Homo sapiens
  variation 101: note = n = C or T
  source 1..201: mol_type = genomic DNA
accaattaacacatccaccagtttggagctcccacccatttaaatggtctgatattctcccaggattcctctctctatgtggttcctccagcagcctttgngctaggtcataatctgtcatcaccactgggcctagctctgcatcctctccaggctgttctccttttgcccccttaatggaagttcccctgcagctccctt

SEQ ID NO: 603 - DNA, 201 bp, Homo sapiens
  variation 101: note = n = C or T
  source 1..201: mol_type = genomic DNA
aaatgtgttgagattacatttgttataagttaaagttaaagttatcttagaagtatatatatatacacacatatatatatgttaatcattaacaacacttnaaagagatgacagtgatagtaacatgcccttgaatttcgttaaggtatatcttagatttaaccaagacacactagtttacaggagctggaaaatatattc

SEQ ID NO: 604 - DNA, 201 bp, Homo sapiens
  variation 101: note = n = T or C
  source 1..201: mol_type = genomic DNA
ggcttccagctccgtccacgtgtctgcaaaggatgtgatcttgttcttttttggaagattttcatttttatttaaaaagttgcctgatctcactgtgtttnggtctgatttgtttacatatgtgcagcagaaggtgctggttgacatactttgtaatacggtcagcaaatcaaaagtcacatagtgttaaataactaagac

SEQ ID NO: 605 - DNA, 201 bp, Homo sapiens
  variation 101: note = n = C or T
  source 1..201: mol_type = genomic DNA
ttctacctttgaattctcctatcctcctctaattgctaccagcatattttccaaggaacttcttaaaagtgtattttcaagacacctttctatatgcctcnaaccagaattacattccttttcttttgtgcccttatagcatactgtgtatatttatcatatgatgttgcttttgtcgttgttgttgtttgtaacttgctt

SEQ ID NO: 606 - DNA, 201 bp, Homo sapiens
  variation 101: note = n = G or A
  source 1..201: mol_type = genomic DNA
atgtcaagaaacagccttagggcattacagaggatattatccatgcccttttaagtagtagacagatgctgtattcagagagaggatttttatgattatcnttcacacagcccaggtgattggtcaaggccataaaggagtctgcaatccttggagaacttttggagtcactttaaccataacgtaatgtattgcaacagt

SEQ ID NO: 607 - DNA, 201 bp, Homo sapiens
  variation 101: note = n = C or T
  source 1..201: mol_type = genomic DNA
ttttgttagcttctgaaattcttaatccatttcaaagcttttaaaagttatataaatatatatcttcctgattgcaatttggagaacacaattatttactngaccttcattcaaggaccaaattcagagggaagcatcgctgatttcagtgcttgagatactgaaaacagtgagaatatggtatctgccctacctaaaaga

SEQ ID NO: 608 - DNA, 201 bp, Homo sapiens
  variation 101: note = n = T or C
  source 1..201: mol_type = genomic DNA
ataatgagagcagtgtattcattatgatttctggggaatagtttcattagagaattgagaaattattgcttttacccagtcactgctctaccaaaaataantgcatttctccacttatcttcacatctccatgaagttttctattatgttttaaagtgaatgaaatgtggcatcacaccaagatattcatcatggtgttct

SEQ ID NO: 609 - DNA, 201 bp, Homo sapiens
  variation 101: note = n = G or A
  source 1..201: mol_type = genomic DNA
aaactactttttctttcagataatcaaaattaatttttaaaaacctgtggaaattatcatacttctaaatgaatcaatcagttaactggttacttatctgnatttatatgtcaaaatcagcaaatagaaaattttaacatcttcgatctcttggcttctgtcttggttcagtctgctctaacaaagtacaatactgggtgg

SEQ ID NO: 610 - DNA, 201 bp, Homo sapiens
  variation 101: note = n = C or T
  source 1..201: mol_type = genomic DNA
gattacaggcgtgagccaccacaccaggcctacttatctatttctactcactactgcttccactgtaaagtctgtgtgaattattttcaaatctgttctcntctaactaggatccagatcatacttctaccagctttggtagaagctacccatttccaactattgaaagcctctttgattagcagctccttaggaaaatgc

SEQ ID NO: 611 - DNA, 201 bp, Homo sapiens
  variation 101: note = n = A or G
  source 1..201: mol_type = genomic DNA
tttgtactataaatttgaatactttgtttttcttcaaaaatggagcaatgtctgcaaagactgtggatctatatctgaccaccaagctccaattgataatncggatattgattttgtgaggctttcctattagtctagaaatgaggaattgatgccttcagtcatagtatgataagaaaaacataggcaacaagaaatttc

SEQ ID NO: 612 - DNA, 201 bp, Homo sapiens
  variation 101: note = n = C or T
  source 1..201: mol_type = genomic DNA
gactcatgactgtgttttcccaggatatgctgcattgataacaggggaaagaattgtctcacttttgtcactaaatataaccagataatttaatagaggcngaggatgagtagtctacagccgtgatgtctcaaaggcagataactgtttgcagaggggcacctcttgagattgggcatcatgaaaggggaggtaagtaat

SEQ ID NO: 613 - DNA, 201 bp, Homo sapiens
  variation 101: note = n = C or T
  source 1..201: mol_type = genomic DNA
cgaatataaatacatgtgtgtatttgcatatacacatgtgcacatacacgtacacatatatataagcaaaatcatgttgttttaggacccccaaataggangctttgaatacacaaagaattttatttatctctgtagtattctaattttctttttatgtctaaatcctctgcctcagtttgttttaattatgtcatttac

SEQ ID NO: 614 - DNA, 201 bp, Homo sapiens
  variation 101: note = n = T or C
  source 1..201: mol_type = genomic DNA
caaagtctttacttgcacttgtcacatttcaaattctcaaatgtcacatctcaaattctcaataggctacctgatcggttggcacggatgtcacgacggancagaccagacaacacaattctagattgttagagccctcatgaaagaatacagttttgaatcacaaaattaaacacacagctaagtgtatttttacatgta

SEQ ID NO: 615 - DNA, 201 bp, Homo sapiens
  variation 101: note = n = A or G
  source 1..201: mol_type = genomic DNA
atatcctttcagtaatctcacgcccaagtagaagactgtacaaacaaataactgagtgagatcatgcatatttttaaatttcagtttccaagttgtaaaantaaagcagaaatcacggcataaacttctgaacagtacttttcttaggctttctatctttttctaacaaactttgagattttttttctcctttcagttatt

SEQ ID NO: 616 - DNA, 201 bp, Homo sapiens
  variation 101: note = n = G or C
  source 1..201: mol_type = genomic DNA
gtgtcttttacaatgatcattactcagattctgtgtttctggtaccgtttaaaggatggctggccatttttccaggcagtcagattcggtgcctcagcctntcttcactcagtcgtcctgcgtgttcccaggaaggacttgatctttattacaacgtccacaagccaagagcacccaccgtctatttcagtgacgcatggg

SEQ ID NO: 617 - DNA, 201 bp, Homo sapiens
  variation 101: note = n = G or A
  source 1..201: mol_type = genomic DNA
ctaggagcccgattacgtaatttaccatccaggtcggacgttgggagtgtgaacaggtgctgtgcatgccgctgggacacaggtagatgccagcgctgccngggaacaggagcgcgaggccacccccacactgagctgtttcgtgagcttgtcagccttcactctcgtccacttggatggccttagacgcagttccaacca

SEQ ID NO: 618 - DNA, 201 bp, Homo sapiens
  variation 101: note = n = T or C
  source 1..201: mol_type = genomic DNA
ggccggtgggtgacactccacaccccacctccttctgagggtaatgcctgagaaggagaggaacaggggctctagtctgtcgtttgatttttcagaatccntaagagtagcggaagaactgcatatggaaagtgcctgctgagaaaatgcaatgacttcaggtgtgttagagaatggccaggctttccaagcagcctccat

SEQ ID NO: 619 - DNA, 201 bp, Homo sapiens
  variation 101: note = n = A or C
  source 1..201: mol_type = genomic DNA
gcctgatgtttcacatctgacaaaactcccaagattgggatgcttcgcagcctctccacggtgccaaaaaatgagggaggtggtgtagctcaaggcctagnttctaacgcaccacacgtgtgtatccaccacagaaatgcagctgccctggagctggcttacaggcttgacactaagctagtccttacattgaagggatgt

SEQ ID NO: 620 - DNA, 201 bp, Homo sapiens
  variation 101: note = n = G or A
  source 1..201: mol_type = genomic DNA
agtgggtcaccttttaaatccacaggggaacacacttcatccctgcaagccctgagaagaaagaacatctgtgcatcttcccagagccttcataagtcccnagtgtgtcccagtgatttttttaaacaagtttaatatgaagaaatactattacaaacaaacaactattagaaacaaaagtttgggcttcattgagacatt

SEQ ID NO: 621 - DNA, 201 bp, Homo sapiens
  variation 101: note = n = A or G
  source 1..201: mol_type = genomic DNA
cgaaatggtgaagctttggagagattttgcggggaatgcactggagaaccatgaagatgtggaaacaaacaaacaaacaaaaaaccgcttttgcatcttcngacatctcacttgtcatcaccagcacagtgccatgcatgagtgacccattgcagggaaacaaaccagagatctcccatgaatgtctccggaaacacaaag

SEQ ID NO: 622 - DNA, 201 bp, Homo sapiens
  variation 101: note = n = C or A
  source 1..201: mol_type = genomic DNA
gggtcacccgggtagagcgagagggctagtgttaccacctcgaggacagaggagaggtgaggattcaggcccagcgggagctggggtcaaggagaggctgncatgcaaatgactccatcaccttcagtcggcacctggggcctggcctcctcccttcccccaggcccaacctgggcaggttagagaagaaaacggaaagga

SEQ ID NO: 623 - DNA, 201 bp, Homo sapiens
  variation 101: note = n = C or T
  source 1..201: mol_type = genomic DNA
caacctcttgggaggcagagttcctaaaagtgtgggagatttaaccagatcctcctataataacaatctgtcaagcaatgcactttaaatccatttaaagntatctttgagtaagaggtgtctcctttaaatactgtaatacccataacgctctcacaaaagctctattcatcgtcctgacaatgctataatgtttgtgtt

SEQ ID NO: 624 - DNA, 201 bp, Homo sapiens
  variation 101: note = n = C or A
  source 1..201: mol_type = genomic DNA
ttgtgccctagaatgaagcgggtgtgcttttgtgaagcgtctctgttttgcgtgttaattctctgaatgcatgtgggtgtgtggggcccaccaggccttcnagtacagaagaaacataagttctcacactctcattcagtcccctagatgcagaactccctagaaatgacttagaataaacattcccacattatcaacaat

SEQ ID NO: 625 - DNA, 201 bp, Homo sapiens
  variation 101: note = n = A or T
  source 1..201: mol_type = genomic DNA
ggactttatctttaggatggtagacgaggtctcagaatgccaggagcactcaccgtggactgtatctttaggatggtagacgaggtctcagaatgccaggngcactcacccgtgaatggccaccacatgttcttctgttgaattttgcttctgtgcccttaggaatgaggggcatgaagtcttgcagagtttgcaggaaag

SEQ ID NO: 626 - DNA, 201 bp, Homo sapiens
  variation 101: note = n = T or C
  source 1..201: mol_type = genomic DNA
aatgccaggagcactcacccgtgaatggccaccacatgttcttctgttgaattttgcttctgtgcccttaggaatgaggggcatgaagtcttgcagagttngcaggaaaggtcgtcacgaagagggtagcaatttaccatctgctgtctttatctgtatgttccataccttctccatctaacacaaatcggcagattccaa

SEQ ID NO: 627 - DNA, 201 bp, Homo sapiens
  variation 101: note = n = A or C
  source 1..201: mol_type = genomic DNA
aggatggctgagcactctgttcggagaaagagccctcttctcagagcccggctgacagagggtgatggtgaggccaccatgccggctgggatcctaattgnccggagactatgggtggtgatatgatgaggggtctgagaggtcagcccttcacaaatgcctggacccctacaattcagtttaaaggtgaaataacatttc

SEQ ID NO: 628 - DNA, 201 bp, Homo sapiens
  variation 101: note = n = A or T
  source 1..201: mol_type = genomic DNA
cagtttgttgtgaaagtttcttttcagctaatcttttttattaaagtattttcaaggtcctatgtgatgaaattcttccagggaacatttgtctttttttnatgtcctgtcatctatcaagcaagccctttccctctttgcatggaattcctcattgtgtgtagtgttaaaggacatgatgtcctttgccctccccagtgg

SEQ ID NO: 629 - DNA, 201 bp, Homo sapiens
  variation 101: note = n = T or C
  source 1..201: mol_type = genomic DNA
atactggcttgttttttaataggtatgccttgctaacacaagttttattacagtcaactttgaagcacaccataggcttgtcaaatgttttgcctagttanaacgaagaaaaataaattaatttttaaataaatctcggaagaagctcacttttaagcaaaaacagaagaaaaagaaacaccactctttgaaacatattac

SEQ ID NO: 630 - DNA, 201 bp, Homo sapiens
  variation 101: note = n = A or G
  source 1..201: mol_type = genomic DNA
ccctctttgctcctggtggttcacagagaaggtactggacacacattttaaatataagcttttactacgtctctcttgtctgcttatgaagacaccagccntggttcgttagatgcgtgggagccaccatttctgtagtggagttccaccgcgccttttcaggaggagggctggcccggagtggggagccacagcagcccc

SEQ ID NO: 631 - DNA, 201 bp, Homo sapiens
  variation 101: note = n = G or A
  source 1..201: mol_type = genomic DNA
aggaactggcagggaaccacaaatgggaggctgagagctgagcaagcatctccatcctggagaaacattatgatgtgcctggccagagtggaagggttacngagttgagactttaggaagcctgtgacccggtggtgcagccctgcaccatgcgcaacactgagtactgtatcttcagaggaaagacaaccatgacccagc

SEQ ID NO: 632 - DNA, 201 bp, Homo sapiens
  variation 101: note = n = C or T
  source 1..201: mol_type = genomic DNA
tggcccaggcacatctagctaaccccagaatgagtcaagaatgaacaagcataataggtttcatccccagacaagtctctctgacttctagaaaaggagcnggggacttgcagaaaaggcgctcagggcatttcccctgggcaggagggagagaagcagagggcaggagtgaagtctccgccaacacatgctactgacaaa

SEQ ID NO: 633 - DNA, 201 bp, Homo sapiens
  variation 101: note = n = G or C
  source 1..201: mol_type = genomic DNA
tgagccaagtagacttacagtatggtccctgttctccctttacactttgctttaagttgcatggtggtgtgcaaaaatcccttcaggagggttttttttcnagctgatcaagttcagttaacccttcaagccccatttaaaatcttctcacattatcttctaattccactttaacattggccaatcattttcccgtgggtt

SEQ ID NO: 634 - DNA, 201 bp, Homo sapiens
  variation 101: note = n = T or A
  source 1..201: mol_type = genomic DNA
aaatggacaatccaagtccaggccaaacagaaactagaaaagttgcctcaagccctaggtcctacaaatacctttcactgtggaggtggttttctttaggnaccttgctaatatggaaatatatttcaaagtcagtcgaccctgaatgggttttcaaggctcctaaatgattatgtaaattttagataaacacagttaatg

SEQ ID NO: 635 - DNA, 201 bp, Homo sapiens
  variation 101: note = n = T or C
  source 1..201: mol_type = genomic DNA
gcagccacagtgtcccctgctgccatcagcaaggcctgccttctgcatctgagccttgctctagacttttctgtctggaacctcactatcccacctggccnccttctcatgactgctccttgaagcctttattttcgcaactaaatgcttcctcctcatcctctcccagccagaattcccccaccatccatcgtcctcatg

SEQ ID NO: 636 - DNA, 201 bp, Homo sapiens
  variation 101: note = n = G or T
  source 1..201: mol_type = genomic DNA
cctttacccctgccgtcccgggacctccccgtttgagaaccaatcactgagctgagcggcgacgctggcttcccaccgaccacttcgatttcaccggaatnctcgagtggggctacagttccacctgcagccctgagagctctcacctgccctcgaggacgggtcctgtgggcccggtggactcccaaagcggcgcgcttc

SEQ ID NO: 637 - DNA, 201 bp, Homo sapiens
  variation 101: note = n = T or C
  source 1..201: mol_type = genomic DNA
ttaaggattgaatgtgatgtatctttgtcagaaagatcatattgattaacagggcacaagaaattatgcatatatgatgaagtgccagcttcctacctganttggtctgatcttgagggcaggaagatgcacacagtgtaatatttctccagactgtgattcagtgtggattcctaggcggtcctaaggagcacagccagg

SEQ ID NO: 638 - DNA, 201 bp, Homo sapiens
  variation 101: note = n = A or G
  source 1..201: mol_type = genomic DNA
tagccagggcaacgtaaagggttcttttcatccttttacacttgtggcagcctttgtcacacatcgcctcattacgttcactctgacctgttctacacctnaaacccggaactgctgccagtctccacaatggctctcccacccacagctccctcttgctcgttggctttgacacagggcatctgtcccttggtcctacac

SEQ ID NO: 639 - DNA, 201 bp, Homo sapiens
  variation 101: note = n = T or G
  source 1..201: mol_type = genomic DNA
tttgttttgtagatacagggtctcactttgttgcccaatctcgtctcaaactccctggcctcaagtgatcctcttgcctcagcctctcaaaattacagggntggcagatatgttaccatggctggcctgaaatagatctaaagatgagtgcttgagtgtattttcccagcactcattctgtaacagcatctagatgaaaaa

SEQ ID NO: 640 - DNA, 201 bp, Homo sapiens
  variation 101: note = n = T or C
  source 1..201: mol_type = genomic DNA
tgtgtgacagtgtacataaactcatatgtaaaagtatgtacacttaagtttaataaatctgataattataaataatacatacatgtaattgagaaagaaantatggaagttctcttgtttcctaggaaataaaaaataaagcaggtattttatataatatttcagagtttagactttggattatgtcaatggtttttgttt

SEQ ID NO: 641 - DNA, 201 bp, Homo sapiens
  variation 101: note = n = C or T
  source 1..201: mol_type = genomic DNA
ttatattttgaatgcccttgaataaattattatgtggggtcccaggcattttgccaggtttgagatgtttcaccatatttcttggtaatttggaaatacanaactttgtatccaactcttaaacaggctccttgttgcccaaggtcagtatatttattggtatgaccaaggctgagaagacacatttcctctatttcaggc

SEQ ID NO: 642 - DNA, 201 bp, Homo sapiens
  variation 101: note = n = T or G
  source 1..201: mol_type = genomic DNA
attttatcaaaaagtggttaaattttgaatatttgttaaaatgaacccaaaatatatagtgatgcttgacataatttaaaataaaatattaagttgatagntatgctactttaaaaattgtgtaattttgaaattctattgtatgtcacttcatggaaattatttttgctccaaatatattttgaaatatgcagtcttaca

SEQ ID NO: 643 - DNA, 201 bp, Homo sapiens
  variation 101: note = n = T or C
  source 1..201: mol_type = genomic DNA
tacacttatatagaattagttttgatgacttatcctgaacaaattttaagtatacatgaataatttttaggtcatggatttggtatgacatttattacatngtaccttcctataggcagattatatctctacattcatcatatgtgtttgccatttgattgtcgcatgcgatgaaactggaacagacttcatgccatccct

SEQ ID NO: 644 - DNA, 201 bp, Homo sapiens
  variation 101: note = n = G or T
  source 1..201: mol_type = genomic DNA
aattttgtatattgaataatattgagactcaaactgaaaggaatataatataccttcaaaagatccaaaggtaatatatttctaaatttggataaagtagntgctacagacatataataattttttcaattttgtcagagaaaataaggtaaaaaatcctatgttttatcttgaactatgagaaacacaaagattttctct

SEQ ID NO: 645 - DNA, 201 bp, Homo sapiens
  variation 101: note = n = C or T
  source 1..201: mol_type = genomic DNA
tacactagtgtttattccataaggacagaatcatgcatattcaatctgaattaaataaggtatgcaagggaaaatatgacagtatagtaaatgagtgtacnaaaatcaacatctaagtttagagttcaataaaaaatgtaattatattggtctgctatgatttatgatttactcttgctgtttattgctcagcaattgatt

SEQ ID NO: 646 - DNA, 201 bp, Homo sapiens
  variation 101: note = n = T or G
  source 1..201: mol_type = genomic DNA
gcgtaagaatcaattgggatgagagtttaaaacaaatttctgggcctatttaattaaacttaagtttgattgaatagatttaaagaaagatacaggaaaanactttttgttttaacaaactattcacatgatttcgaagcaggcattaaatacgggaccatttggaagatgcagcaacacaggtgcagattctctgcagtt

SEQ ID NO: 647 - DNA, 201 bp, Homo sapiens
  variation 101: note = n = A or G
  source 1..201: mol_type = genomic DNA
tcactatagcaggttaaatgtcattttcataaaataaaaagtaaaaataaaagtctttacaaaagtttgcagtcatttaagttggtcattaacccaaccantgccatctatggcataatatctaaaatcaacgatgtactaacctgcttatttttttctgtgaatccatgacaaaaattattcaccaggtccattaaccat

SEQ ID NO: 648 - DNA, 201 bp, Homo sapiens
  variation 101: note = n = G or A
  source 1..201: mol_type = genomic DNA
ataagtagcaatctggagaccaccatagttcagaagttaagtccagaggcatactttgagacaagagaatttccaagacagcggcagggacataaacccanataatccagtgtatgtttttaaatatccacatgaataaaagaatagtgtatgactgttctatttgttcacatatagggttattattggaatacactgata

SEQ ID NO: 649 - DNA, 201 bp, Homo sapiens
  variation 101: note = n = A or G
  source 1..201: mol_type = genomic DNA
ttttcagtatttggagaaatttgcatatggcatttttttttttctgaaaggtagtgaggaataagtgggtggattgtgttaggcacgacatctcatcccantggtgacattttttgacactcattgggcaaagcatgtatagacaaaacccaaggatgtttttataaaggactctaagatctggttgaggtagggttggag

SEQ ID NO: 650 - DNA, 201 bp, Homo sapiens
  variation 101: note = n = A or G
  source 1..201: mol_type = genomic DNA
gtactttcagaaattagttatatttttgcatgttcatggacatactcataaatctaactggacttcttttttaagaagtgaaacaaagtctgaattctccnttgtcatgtaggcctcagttccaggagctgtcctgtaagtttcttgagaaaaggtgctcccaacctgtacgtgggacctctcgacagctgcctcatagcc

SEQ ID NO: 651 - DNA, 201 bp, Homo sapiens
  variation 101: note = n = C or T
  source 1..201: mol_type = genomic DNA
ttatttatctttttattttctttaatacttttcaggattccttttcaatgattattgtttattattgaatttatgtatggatttatatcattgaatttatngtttttggataatgtgaggttcgtgtctacaatttttttccaatctagaattgactcgttctaatattatttatcaaatagtagatttgcctttttcctt

SEQ ID NO: 652 - DNA, 201 bp, Homo sapiens
  variation 101: note = n = T or G
  source 1..201: mol_type = genomic DNA
caagacaggtatttatacctcatgtcacttaaaataccactaattacatataacagttgtaaaaatactatgtttccaaatggtaggcatatttgaaaatnaagatacttaaaaattaaactttatagccatatttagaatcacaaattaaggcatgccttgatgtaatctttgcagatgaaagggaatgagtttttgggc

SEQ ID NO: 653 - DNA, 201 bp, Homo sapiens
  variation 101: note = n = T or A
  source 1..201: mol_type = genomic DNA
tattggagtgctgggttaaatttcagttcttaatgtgcaaagaaatgaatgggaaatgatgtaatgtgagtgaataaagatacttatttttaaatgagacntaaaagcagctggagtgtgatatttcattaactcacgcatgcgcttgtgtttgtgtgtgtgtgtatgcttcacgtttgtttgctttacaatatggggcat

SEQ ID NO: 654 - DNA, 201 bp, Homo sapiens
  variation 101: note = n = T or C
  source 1..201: mol_type = genomic DNA
aggtatgtctttaatgtcagtgtaagagcaggctaatgcagtgtgtatctatatgtgtttgcatgtgtgtgtatatatctctatgtactcagcataaatangttggtttaacattttatatacataagtaaagtagtacttattagtgaaaataatgcaagttaactgagaatgaaaattatttcataggggtttctatag

SEQ ID NO: 655 - DNA, 201 bp, Homo sapiens
  variation 101: note = n = A or G
  source 1..201: mol_type = genomic DNA
gcctaaaaaagagtgatatggatggatatgtggagagaacacaaaatgtgagaatttttgtgtcttgtgtaatgcttatccagagctatccacaccaaaangttttcaacaactaaaaagaacagtaatcctatgaccacaaacattttgccataataaccgagataaaggaagtgcaggcgcccaccaacatggattctc

SEQ ID NO: 656 - DNA, 201 bp, Homo sapiens
  variation 101: note = n = T or C
  source 1..201: mol_type = genomic DNA
acttgtatagagaagggaaactttcttcaacttactcaaactaagcaaatggaacatcagctaaacagggcacttcagggatataagcccaaaactaatantatgctggcttcttgaagataagataaagtgcattttttgccttaggaaaagaagcacatcatttcaaataacacggattattgattaatagttcaggta

SEQ ID NO: 657 - DNA, 201 bp, Homo sapiens
  variation 101: note = n = A or G
  source 1..201: mol_type = genomic DNA
gattacaaattgctgtgttaaaaagatactgagacgctcagggggaaaataattaaatgccgactaactaaattaattctcccacatcccaagctgttctntctcccttatgcctttccctctgccatcactgatgatcacgtacgtatctgttagaacctgcttctataatgaattcaagttacaatgaattcaggtttg

SEQ ID NO: 658 - DNA, 201 bp, Homo sapiens
  variation 101: note = n = T or C
  source 1..201: mol_type = genomic DNA
acgatggttggtcctgctcagcatgaagtgaagaaagagggatggagaaggcatggccaacacagtgctccataacattcaaaaatgtattgttgatcttntctccatcgttatccaatctacagatccttattctcaccactctttgtattgctcttacactttcatgctacagcaaatgcatattctactcttttgtcc

SEQ ID NO: 659 - DNA, 201 bp, Homo sapiens
  variation 101: note = n = C or T
  source 1..201: mol_type = genomic DNA
ggagcactgatgatgtgacagattctgtgtgagaaagcattgagaatgaaagggtgagcaggagttactaaaagaaagaggttagcatgagatggggttgngattcagaatgaaaagcaaatacagaaccatcccctcacacccctcccccagcagtaagatacagtacattgacactaaaaaactatacctcactccagg

SEQ ID NO: 660 - DNA, 201 bp, Homo sapiens
  variation 101: note = n = A or G
  source 1..201: mol_type = genomic DNA
gttttagaactgtttgtaggctgtagaatctctcatatctgcattatattatgtactatatttctgctatattgaatttctccggagaagagcaaaatacngaataccaaacctctcaaagctgtgtgcaagtgctgttacatagtatgaccactagatggagatcgtgtccaggtggctaaaacttaggcttccttgacc

SEQ ID NO: 661 - DNA, 201 bp, Homo sapiens
  variation 101: note = n = G or A
  source 1..201: mol_type = genomic DNA
ttatttttaaaaatcagctttgagattaacaattagatatcaaaattattctaaaagtatatttaaaacatacttatatttgtacatcagatttgcttatnctcacttttatagccagcaaatagttcccccaaagactaaaccaatttaggtcaatttggtaaaaaaaaaaaattatggatttacttttggcaaatttct

SEQ ID NO: 662 - DNA, 201 bp, Homo sapiens
  variation 101: note = n = C or T
  source 1..201: mol_type = genomic DNA
atgttggattttatcactttctggtaagccacgtgttaaagatgaccaattatgagaactaagtgaatgtgtgttaaaagcagaaaagccagctgtttgangctcaatggatccagtctcaatttccaatggactcaaataagcaggctagctcaactaacacatctagaaaaatgcaggagagagaaggaaggaaaaaac

SEQ ID NO: 663 - DNA, 201 bp, Homo sapiens
  variation 101: note = n = A or G
  source 1..201: mol_type = genomic DNA
aacataaaaacaatttttgaaattgcaagacattggaatttttttactttaatggtaaaataagtaaaatatcataattataatgtgctctacttttaagntagaaaaactgattataatgagcaatatctctttcaaaaattttacagggatttatataataaaaccattttaatgatgcgagatgcacatattcagttt

SEQ ID NO: 664 - DNA, 201 bp, Homo sapiens
  variation 101: note = n = A or C
  source 1..201: mol_type = genomic DNA
gaatatgacaaatctttctccactatatggaaataagtatatgtgtttgtgtttgttcatatacacacacagatacatgtgtgtatatacataatacatanatttcttattgtgttatgaattatattttatgaaaattaaaacaacctattcctgataaatacctctttctaaaatgatgcatattttcaagctgcagaa

SEQ ID NO: 665 - DNA, 201 bp, Homo sapiens
  variation 101: note = n = A or C
  source 1..201: mol_type = genomic DNA
ttcttagaaagtaatttttctgaatggcaagggttgggatgatgggtagtcctttactctttctcttggacgacattaattcttataaaaataatgtgacntagaaagctgtttattttaaaacctgttttttagttttgctctggcaataggactccaatatttacctagagaatgaatcaagagcatttgtctgtcttt

SEQ ID NO: 666 - DNA, 201 bp, Homo sapiens
  variation 101: note = n = A or G
  source 1..201: mol_type = genomic DNA
cttcctggtttctgtggtcccgatagaactctctctctccatactgaaaaagaattccagatggcttcatgatggcaaagaagccagtgagaactcacccnttatttcattgtataactgatggagctgaagattataaacaaatgttgcattacagtatctgaaagggccttagttgtgaagaacagaaatcagttctaa

SEQ ID NO: 667 - DNA, 201 bp, Homo sapiens
  variation 101: note = n = A or G
  source 1..201: mol_type = genomic DNA
agcaagagaaagactacagtgattagcaacttttcacgtacctgtggattctcccaagacaagcccatccccatccccaagaataattgctttcaagctcntcatggtctcccttctttcttccagaaagatgccttgggattatgtctcctttttcccagacaaacttttaaaacataatcaaaatataactaggtttta

SEQ ID NO: 668 - DNA, 201 bp, Homo sapiens
  variation 101: note = n = A or G
  source 1..201: mol_type = genomic DNA
ccaattattttgggctctggattgtcaggcgggagacctgagttactcactttgtgttttcactgcttccctggttttaaaaggtcattgtgacaagagcnatagaaggagcttgttcaagatgctgattcctggccaccacgccctgtgcttctggtgcagtaggtcttcagtaggacacagggacttgcatctttagcc

SEQ ID NO: 669 - DNA, 201 bp, Homo sapiens
  variation 101: note = n = T or C
  source 1..201: mol_type = genomic DNA
ccaggcccgtgataggattgtgtttcttggccacgttgtggttgagtgggttctggctaatgagttgtgaaaagtgatgcatgtcacatttagctgttgangtgagaccattggaattcctttcatcctctgcaaagtgacctgcaatgtaagagatggtggctcctttatcagcctgagttcctcagtgatgatgataag

SEQ ID NO: 670 - DNA, 201 bp, Homo sapiens
  variation 101: note = n = C or T
  source 1..201: mol_type = genomic DNA
ttaatctaaatacaaaaaattggcagacttttccaattacctggaacaaatgaaggaaaaacctactgaagcatggccaaagtgctcagatgctttagtgnggtatgttaatttgctagggctgctgtaataaggtagtacagactggggagcttaaacaactgaaatgtatttgttcacagttctggagaatagaagtcc

SEQ ID NO: 671 - DNA, 201 bp, Homo sapiens
  variation 101: note = n = G or A
  source 1..201: mol_type = genomic DNA
cagctttagctgcaataaagtggtattggtctctatctgacccctacacatatttttcaattagtctagtgtgttatcatcgtctttaaaccataaggacnctttagctcaaatgagccttctatgtggaaagagtggctaattaagctcacgtgtgccattaattccttggtttgaatgagtacataagtttccttctag

SEQ ID NO: 672 - DNA, 201 bp, Homo sapiens
  variation 101: note = n = A or G
  source 1..201: mol_type = genomic DNA
gaaatgttaaggcttttgaattctagggtttgagttcaatgttctcaaaatatgttgatcatcaaatccaacttccagggactttggacttttgtgaaagnctaaataatgtcttttaaaaagcaaaatgtaggctgggtgcagtggctcatgcctgtaatcccagcactttgggaggccgaggtgggaggatcaccagaa

SEQ ID NO: 673 - DNA, 201 bp, Homo sapiens
  variation 101: note = n = T or C
  source 1..201: mol_type = genomic DNA
ctatgcttgcgtatagatagggaggaacaaaaggaacaaactagaaaggatcaaagatactaactttagggaaactgaccttccttcataaaggaaaaggnttgcctgcatctcctacccagttctttgcagaattcaaaagggctcctattgctggaccttagtacaggtcagtgagataaatcattcattgattacctg

SEQ ID NO: 674 - DNA, 201 bp, Homo sapiens
  variation 101: note = n = T or C
  source 1..201: mol_type = genomic DNA
tctgaagcacactctgtatctgcccttacagctgcctgcctggctgcaccaggcagtgatggaggggccctgaagtctaattcacacaatgctctggaacnctcttattaaggccactagatggagggagtggactcagggatcatcggcagtgcccaattaatagtgtgcatggtggaatggtgtcaattagtaatactt

SEQ ID NO: 675 - DNA, 201 bp, Homo sapiens
  variation 101: note = n = G or A
  source 1..201: mol_type = genomic DNA
aaaagtttaaagccagaatctctatctccttcactaaaatatttagtatttcatgtattgtggcaggactcatgtgttaagtcataaaaacacccatgaanttaagactggaagcctgggttataaccaagtaagcacttaagattgtcatgctaaccaatggtctgagtactgctgctaataatgtttattaggcaatca

SEQ ID NO: 676 - DNA, 201 bp, Homo sapiens
  variation 101: note = n = T or G
  source 1..201: mol_type = genomic DNA
aatagtaaaagagccaataaaatataaaggaacctgcattttagtactggaatttttttttatttggattgaaaaatgtgtggaaaatgttgtctactttnttacaccatttcctgatagattacatcaatgcttcctagtgatgtaccctactgtgaaaacaaaacaaaacataagcaaaaaaaactttcactaagattc

SEQ ID NO: 677 - DNA, 201 bp, Homo sapiens
  variation 101: note = n = C or T
  source 1..201: mol_type = genomic DNA
gctcctctcaactgcattctgagagtaggcctgtttgaacagaatgcaaaggaaaaaatgtccatatgaatcgccagggcagtcttgctgatttaagttcnatagcaggtcctgaaacaactccaaaactcaacttcaatacctcttacctgcagtttgaaaagagatcaactgggagacatgtctgcctatggccccaga

SEQ ID NO: 678 - DNA, 201 bp, Homo sapiens
  variation 101: note = n = A or G
  source 1..201: mol_type = genomic DNA
ctcctctcaactgcattctgagagtaggcctgtttgaacagaatgcaaaggaaaaaatgtccatatgaatcgccagggcagtcttgctgatttaagttccntagcaggtcctgaaacaactccaaaactcaacttcaatacctcttacctgcagtttgaaaagagatcaactgggagacatgtctgcctatggccccagag

SEQ ID NO: 679 - DNA, 201 bp, Homo sapiens
  variation 101: note = n = G or T
  source 1..201: mol_type = genomic DNA
tggtccactgtttagcttggaaagattatattgtgagaaggatggcaaaatatatataaaattaggggaagtttctttctaaaggcctctgtatttctggnttaagtctaattgttcttgcatatctaagagcatgtttacaatgtccatttgtcattcagcagcaactaagaacaatatttatgtaggtttacttagaac

SEQ ID NO: 680 - DNA, 201 bp, Homo sapiens
  variation 101: note = n = C or A
  source 1..201: mol_type = genomic DNA
tatggtttttatttctttgtttcctttatctcagatatttttgtgtctgctgaatgtctaagggagtgttctatggaaaacaggactaataaatctccaantaatcccaattgttccaaggactaatgattgactatccatttaacagatgacccatttgtgcaaaggcaattaatcaacttttcatcgagtcttatacaa

SEQ ID NO: 681 - DNA, 201 bp, Homo sapiens
  variation 101: note = n = T or C
  source 1..201: mol_type = genomic DNA
gatgctaagaatgtatgcaaacttgttaaaactatcttttattaaaaataaggacattttcaaaattacccaccttttttctcctctactcacctccaaanttctgttagcactactggaatttttgatctaaggactcataattaagtaatcattttttattttatgtggtttttcttctaaaatttatttttctattaa

SEQ ID NO: 682 - DNA, 201 bp, Homo sapiens
  variation 101: note = n = G or T
  source 1..201: mol_type = genomic DNA
attaatttttttgataatcatgcaggaatatttgctcttgaatcatatatgaagtatatctttgacaacacaggccaccaaaatttaattagtgactgaanagtgttgaataaatatgtttgttctacaaacggaaaacaattttttatgtctaaagctttaatggaattgtcacgaaatataattcattttttttcaaac

SEQ ID NO: 683 - DNA, 201 bp, Homo sapiens
  variation 101: note = n = G or T
  source 1..201: mol_type = genomic DNA
tggttatcatgctttttgctacaagcgcattttgtagttttaatcaaaaacagttgttttgcaatgctcatttatcttattgttctttgttttttaaatantgtctttggctgatttcttaatatttaagtagctaattcacagtcacctttctttttcttttactgatttcatggtgtttccgtgctgtaattgtagagg

SEQ ID NO: 684 - DNA, 201 bp, Homo sapiens
  variation 101: note = n = G or A
  source 1..201: mol_type = genomic DNA
tgtatataacaaagcaacttatttttgtttgttgattttatatcctgtaacatttctgaattcatttattagttatataattttttgtgaaaggatttctntttcttcactcacagaaataatttgtctctcacagttactgctcaaagactgattataggccacccactcaattggcttttcctccaatatactgaattg

SEQ ID NO: 685 - DNA, 201 bp, Homo sapiens
  variation 101: note = n = A or G
  source 1..201: mol_type = genomic DNA
gtcaaggttgtgctgatgactgcctgtgcatgtcccttactatgtgatcaatgatacccaagactattcatattctacttataccatttgtgggaacaggntggaaagttttatgtagataatgttaagaagtttgttgttgttgttgttaattttcttctgtctaatctgagaactcgttacccagtaatctctcaggaa

SEQ ID NO: 686 - DNA, 201 bp, Homo sapiens
  variation 101: note = n = T or C
  source 1..201: mol_type = genomic DNA
gattcaaagagttgtttttgaagacactttagcttcccaagttgggcagatggcctaaatcacctcttcatcaggagccttatgtcagtgtcaactttganttatctgagctttatttaagaaggtagcattttctttccacttgagtattctcattgagccttcaaatttaaacagtaaaaccaatggatgtgtctttta

SEQ ID NO: 687 - DNA, 201 bp, Homo sapiens
  variation 101: note = n = T or C
  source 1..201: mol_type = genomic DNA
ccccaaagtagagactttattggtgcagtaaatcattttcaggactactgaatttcttccttcatttctccatgataaagcagtacttcctatttagccanggttttcaacaccaaaaagcaattccagtatttatttttaggaactctgtaaattctgcagatatcaaggaaaagatggtggtgtgtgcctcttaaaaga

SEQ ID NO: 688 - DNA, 201 bp, Homo sapiens
  variation 101: note = n = C or T
  source 1..201: mol_type = genomic DNA
tttgcatattttatcatgtttacagcacatttaatcctcaaatatctagggataaacttgaaactttatatttgaatgattaaagaaatggagaaagggtngtgacttccttactatagctaatagttttaatagtatctatcatttaatgagtaattgtaatatatcaggaattctgctacttgatttatatatatcatc

SEQ ID NO: 689 - DNA, 201 bp, Homo sapiens
  variation 101: note = n = G or A
  source 1..201: mol_type = genomic DNA
tattttaattactgtatgctagacttctatatctctttgtcattattgatttttttttcatttggcttttatttggtaccaactaaatggaatattttctnagaagcgaaatacttctagatcattgcagtctttaacaatacaagcaatattcaaccagggatttataatcagagattcctttgaatttcttaattctgt

SEQ ID NO: 690 - DNA, 201 bp, Homo sapiens
  variation 101: note = n = A or G
  source 1..201: mol_type = genomic DNA
agttaaagaccgtgtctttgagctctgaatttctttcttctactgttaattctattgctgagactttctagagaactttgcatttctataagtgtgtccantgttatctgtcttctgggtccagtcaccaagcaagtctactggctctgggctggtactgggggttatcctgcacagagtcatgtgatgtgaaccatctat

SEQ ID NO: 691 - DNA, 201 bp, Homo sapiens
  variation 101: note = n = T or G
  source 1..201: mol_type = genomic DNA
gaggaaaattacccataaatgcagaaattcaaggcatttatggagaaaatgaatgtgaaataaaacacagagagaattcgtggagcaagtttgtggtagantgaaagcaaatgaggcaaatgtagcacatgaagccataatcatgagttctcaggactgtaggtagcagggaaggtctactaaacaagtctaaacattgaa

SEQ ID NO: 692 - DNA, 201 bp, Homo sapiens
  variation 101: note = n = T or G
  source 1..201: mol_type = genomic DNA
ctaagagcgtgtctttattctttgttacaaaaatctaaagtaaaagggaaaaatctctttaatggctgctgtaactacattgcttttcttttatgattgtngtcacagaaaatgtaaaagactttttttcttaagacaattcttttcattgttaaataacatttatattctactagccttctagaaggaaaaatgcacagc

SEQ ID NO: 693 - DNA, 201 bp, Homo sapiens
  variation 101: note = n = A or G
  source 1..201: mol_type = genomic DNA
aatctgggagagcaaaagcatttattgcctcaatatttttgcctgaattgggttatattttctcaaacctacttttatctttcagccttatgattactctntaagaaaccaaacatctgtagacttaccttcatatacaaacttcaatttaactgccactagcaatgcctccatatttcaaaaaaggagctcttcttctgg

SEQ ID NO: 694 - DNA, 201 bp, Homo sapiens
  variation 101: note = n = G or T
  source 1..201: mol_type = genomic DNA
gcctcccaaagtgctgggattacaggcatgagccactgcatctgccttgttttgtaagctttagacactcctgtgctacagcagcttccatatgaggctgngtttcatgtgtataagttactagctcagaaaatccaaagctaaattcctggttgcatagtattctagtaaatgtatattttatgatttatttaaccaact

SEQ ID NO: 695 - DNA, 201 bp, Homo sapiens
  variation 101: note = n = T or C
  source 1..201: mol_type = genomic DNA
gtcattgttcattgttaaggacattcaccttttcatggctttgttctgttagatgaaagtgtttctagatttggcatttatctaacatagcatcatagggngaatggaaatgctgacagtactttataggaaatgaactgctaccaactatggcttgccaggccctctagtaggtaatttacatacatgaacacaaacttg

SEQ ID NO: 696 - DNA, 201 bp, Homo sapiens
  variation 101: note = n = T or G
  source 1..201: mol_type = genomic DNA
ttacctatgtctgaaatataggaagtactcaataaatgtttggggaaagaagagaaggaaaagaagaaagaaaaggaagtgtgctctttgttagttttccnaaaaatgcctcaagctaattaatgcaagggaattcaaaataaaggtcagactggaggtgaagcaaaatctgtatgtgtcatctgtgggaatcaagtctgg

SEQ ID NO: 697 - DNA, 201 bp, Homo sapiens
  variation 101: note = n = T or C
  source 1..201: mol_type = genomic DNA
cttgtcattactctactttccctgcttttttatacaccacagatggctggctgcatattctcttccttttggccttgccaatgtgggatttctaaaacaantgatcatgtttcatagcatgttcataataatcattaaaatatcactttcctttactctccattctacatgtagctgagataaatgctatttaacctatgc

SEQ ID NO: 698 - DNA, 201 bp, Homo sapiens
  variation 101: note = n = T or C
  source 1..201: mol_type = genomic DNA
ttataccaattttgtaattatttatttctttatggtatgaggctattgtgatcctgcctggagaatgattatgacattgaagaagttatgctttgacatanctaaacctccttacagtatcctttctttttgctgcctcactgtcatgtccaagaacctcataaagctcataaagaatgctaaatgcagctttactcagac

SEQ ID NO: 699 - DNA, 201 bp, Homo sapiens
  variation 101: note = n = C or A
  source 1..201: mol_type = genomic DNA
agataaatacagcatggatttttatataaatatttgttagaaaggcaaattttagtgcctaatctgagaaattttagtaaaagaattacattataaattanattaaaggtcaacttcatctgggaactttgtcagagaataggacaaagggccacccactttgacttgagtcagaaatttctaagttacaatgaaatagct

SEQ ID NO: 700 - DNA, 201 bp, Homo sapiens
  source 1..201: mol_type = genomic DNA
  variation 101: note = n = T or C
aactccaaccaagagtttgtgggaggcatatcccattaaggtgacatttaagatggcagttttattttgaggaatctctctgttttgtccagatcaatgtntttaacttgcacagaatttgggaataaggcaacgcctagttgggggagacatatagagaagaagagaaaagtgagaggagcgtcaaaggcctattgtagg

SEQ ID NO: 701 - DNA, 201 bp, Homo sapiens
  variation 101: note = n = A or G
  source 1..201: mol_type = genomic DNA
ttgacattaaatcacataatattcagacttgtaaaaactaacaggcatattatgcatggtcttttagtaattatatatttctaagcacaactacaactacnaaccttcaaatccaagagataaacacttatttatagtacaattttttgcttttcttttctctcgccatcaccccagcagtacagacaaacccatcatgta

SEQ ID NO: 702 - DNA, 201 bp, Homo sapiens
  variation 101: note = n = C or T
  source 1..201: mol_type = genomic DNA
ttcagaaaattcttatccttttcctatatatgatattttctcacttctgttttaaagtttgtgtaatcttttttctttgttgcattcaccaaacttttacntattttgccttttcaaatcatacattttgacattttcaaagagtgtgagtatttttagtgaagtttagggagtgagagggctaaagagagaagacaacat

SEQ ID NO: 703 - DNA, 201 bp, Homo sapiens
  variation 101: note = n = T or C
  source 1..201: mol_type = genomic DNA
atttatcttttgaaccttattctctcagcattctcagattgctcattcttatggtctatataatcatgaaccctactctagggcagtgaaagagttatacnattagaatgacctgggaactttttctaactagacatgcctgccttcacttcctgcctcccatatagaaaaccccctatcctagttccaataggtatgaga

SEQ ID NO: 704 - DNA, 201 bp, Homo sapiens
  variation 101: note = n = A or G
  source 1..201: mol_type = genomic DNA
tgaacctagaaaagaaacctgcccccatctcacaaaccacagagcccatgactgccaggcttgcatgccaagataattgtttgtctgtctgtagctgcttncagtagcccaggtggtaatactactcagacctggaggtcagaacttcccctccaggtgtgttacagaatccttgacataaacagcagctcagtacaagaa

SEQ ID NO: 705 - DNA, 201 bp, Homo sapiens
  variation 101: note = n = T or G
  source 1..201: mol_type = genomic DNA
tttgttctaagctctgccagtattttgtcacatgatctttcatacaccagttaacatccacttgggaattgagtgctttttgagctcctaaacagggaatnatgtttttcccattagaaaattattttatgaaaatatttctaagttcctgaattagaaggatagattttttaaaatgttctatgcaagattatgtctaga

SEQ ID NO: 706 - DNA, 201 bp, Homo sapiens
  variation 101: note = n = G or C
  source 1..201: mol_type = genomic DNA
gaggtaaaacttgaaagaacataaaagtattgaaaagatcaggtcttgtctgatccattacccatattcatataaataaataaatagcaaaatcagcacantcaacaatttcaaagatggtttatttcaagaataaaaattttaatgttacttaaggtatctcaatttataaagagagatgtaaaactcctgttcatttta

SEQ ID NO: 707 - DNA, 201 bp, Homo sapiens
  variation 101: note = n = A or C
  source 1..201: mol_type = genomic DNA
cagtgtttaaattttacctaattctaccaccttatggaacattatttcttatgacattgttaaaaagcagaaacaaacaagacgaaatttaaaaaaaaaancccaagacaaaatggcatcaactaattcctgcattttatttttgcagaaatggatctaaataaattaattttttatgatggactaacaggtaaagtgcag

SEQ ID NO: 708 - DNA, 201 bp, Homo sapiens
  variation 101: note = n = C or G
  source 1..201: mol_type = genomic DNA
agggtagttttgtaatttcttaattattgtgtcaaagataaaatgaagaaagagtgattatcatgattagaattgttcaggaaagactcaactgtttgcanaagacttagcgatacaacttacaattcaaccaacagttaaggttttcgacaggaaaaaaaaaattctgttctccagtactggagacacaaatgtgagaaa

SEQ ID NO: 709 - DNA, 201 bp, Homo sapiens
  variation 101: note = n = T or C
  source 1..201: mol_type = genomic DNA
tcaggctgtggcttctttctcagctcttaaaaagactgtaatctgtctcacagttgtactgcctgattgttagttggctctattcaccctacctagatggnaactaaccctttcctgacactttgaaaattctttcattcccttggttttagttacctctctcgcacgcacaccatcattattctactgttctttatttat

SEQ ID NO: 710 - DNA, 201 bp, Homo sapiens
  variation 101: note = n = G or A
  source 1..201: mol_type = genomic DNA
taggcctcagtttctgcatacagcatcttatttaatgaccacaataaccctataatcttggatctgtcttctccactcatactcaactgagacaatccaancgctttacttattctcaatttaaagtcatacttactagcctaactgcctccccttccatttgcaaaaatgtgcaagtttacgccatagggttgcaataaa

SEQ ID NO: 711 - DNA, 201 bp, Homo sapiens
  variation 101: note = n = G or A
  source 1..201: mol_type = genomic DNA
gaaggatagggtgtattcaatattagtaaagtgctaaagagaaacatgactctgaaggcctctgggctttgaaacagtaaatatatgtgtgctttttttgnagcaagggtccttaggttctaagtattctgtaacacaaaatttttttataaactatttaactagacattaaggatggcaggaataggacagactaaaaaa

SEQ ID NO: 712 - DNA, 201 bp, Homo sapiens
  variation 101: note = n = G or A
  source 1..201: mol_type = genomic DNA
cttatggtacctgaaatagatcttaagctgggcaaatcaagacaactgaagaactttctactctagtcttcttactccctttatcctcaaagggtattacnttagcaggaatcaaagagggtctcctgctgttggcaaaactctgggaggtagaaagaaaagaaatggcaagcccaagaccaatctccctgctcagaggag

SEQ ID NO: 713 - DNA, 201 bp, Homo sapiens
  variation 101: note = n = G or C
  source 1..201: mol_type = genomic DNA
tctaacacttccccttctctcccattttacagatgtaaagtaaacttcacttcccagagaagtgaagaggtgagtccaaggcagtacactcttaagatttntggatcaatccatccctgttttgtttaccaaccaccattaaacacacaaaagttttatcaaggcacaaataggatatcaaaacaattcaagacttcagca

SEQ ID NO: 714 - DNA, 201 bp, Homo sapiens
  variation 101: note = n = G or A
  source 1..201: mol_type = genomic DNA
ccaccattaaacacacaaaagttttatcaaggcacaaataggatatcaaaacaattcaagacttcagcatcttctgagagccgagcacttgagtacccacntggtgatggggaaaagtaaggagaaaacaccatatgggcaccatcctgattatgaaactggcccaattgtctcacagaactaatgtttttggtttctttt

SEQ ID NO: 715 - DNA, 201 bp, Homo sapiens
  variation 101: note = n = A or G
  source 1..201: mol_type = genomic DNA
tagaagacctttttcaccttcgcccctcttcggctcctcctcgccctcctccttttccaatcagcctgcctggtgacatccgagctgagggatgaatagtnagcaaggagttcaccagcaaacccttttcaacagtaatgaggcatttgtgataatcgagtgatgaaatgtaaatgggcagtaatgagcacaattacatcc

SEQ ID NO: 716 - DNA, 201 bp, Homo sapiens
  variation 101: note = n = T or G
  source 1..201: mol_type = genomic DNA
aaacatacaagcttagaattggctcaagtttattttataataattgaatagtcacagttagaggcacctgtgacctgaaaatgctggttgaatggtatttncgtatttacagagcagataccatagctaaagtgtattttaccagcattatcaaatattggattcaaagtctcttttaatacatttctgataaaaatatat

SEQ ID NO: 717 - DNA, 201 bp, Homo sapiens
  variation 101: note = n = G or A
  source 1..201: mol_type = genomic DNA
aggaatagcagatgaggcttgtgtgcttctagcaagaccgcatgagagaaggtggtaatttatctctccttctttatgctgcagagataaagaagaactgnaattaatccactcaagcatatgaggaagagaaaacttagtttcacaagtaatcaaattattatactgtcttgtaccagtacatcacaggaaacaaatttc

SEQ ID NO: 718 - DNA, 201 bp, Homo sapiens
  variation 101: note = n = G or A
  source 1..201: mol_type = genomic DNA
acaataccttaggaaaggaggcaaagaatgtaaaaaccacattaatccattgcacaatgttttttaaaaaagaaagaaaaaaaggtattactctaagtccngctttattaccatcacaatcaatagaaacaaatttgtagtcacagttcaccttaagtgacactaactaaaaagaaaatggtgtgtaattaatgtgtaatt

SEQ ID NO: 719 - DNA, 201 bp, Homo sapiens
  variation 101: note = n = T or G
  source 1..201: mol_type = genomic DNA
tccttggtgtcacctcccaggctccaggggagcacccactgctcttttccatctcactttactcagaataggtgctcagcccttttaagtactgcgtaagngtctccgcccagctggctctcagacccagttgctggcttgcatgcacatggcctgctacagatttcctgcagccacaggaatggctcctggtaccttctc

SEQ ID NO: 720 - DNA, 201 bp, Homo sapiens
  variation 101: note = n = G or A
  source 1..201: mol_type = genomic DNA
agttttgtggtgagggctaagaagggagagtaataggaggtggagaaggaggagccaggcaggtaaatgaaaaaggaaacgggttccttctccgtgaaacngagctagacgagcagctgattccagaggttgtgacgattctacagaaatgcatggttggggttctcagcccagcgacctccacggctcttgcctgtcagc

SEQ ID NO: 721 - DNA, 201 bp, Homo sapiens
  variation 101: note = n = A or G
  source 1..201: mol_type = genomic DNA
gtgataatgcctgtgtcattgtgtttttatgataattaaatgagttaaatataaacagttttagaaaaatgttgggcaaagaggaaaacatttggtgaacntttttatctcgcttcatcatacctgttgctgttggctcctaggggcaaaccttgagttaagccccactatccctatttctggatattttaaatcatgtga

SEQ ID NO: 722 - DNA, 201 bp, Homo sapiens
  variation 101: note = n = A or G
  source 1..201: mol_type = genomic DNA
acaatcagatcttccgatgggtgggaggaaggtgggagagtcagatgaagaccacttgtgtccaaattctccaggagctgactggcctgaaaaccacatgnaaccttctcggtaaatttcctcacagcgtctggaaagccgcgggcagcgaaatacacctcaggtctgacctcccactggctgatgatccgcaagattcca

SEQ ID NO: 723 - DNA, 201 bp, Homo sapiens
  variation 101: note = n = C or A
  source 1..201: mol_type = genomic DNA
tttaattattgcttgtgtcatttgtcttctactagcccctgtggacccagtcccctgttcctgcactctgccctaagccctggaagttgacaaaaagaacnaaaacctctccccttgcctttgcttcgtggttgagtttggccatcgaggagctctggtggagatgtgaagaagggagagtaaggtcaaggtattcattct

SEQ ID NO: 724 - DNA, 201 bp, Homo sapiens
  variation 101: note = n = A or G
  source 1..201: mol_type = genomic DNA
gactcttgatgtgaagacggttctagggccatataaacagagtttttgatctaccaggaatagttggtagactgggcacttatagccatgattgaatgtcntagcttgcagagcctgtttgattgcggaaacagaaactcagctcatgccggcttatggtctgacatcagactcagctgtatccagagctcaaactcacca

SEQ ID NO: 725 - DNA, 201 bp, Homo sapiens; identical to SEQ ID NO: 715
  variation 101: note = n = C or T
  source 1..201: mol_type = genomic DNA

SEQ ID NO: 726 - DNA, 201 bp, Homo sapiens
  variation 101: note = n = G or T
  source 1..201: mol_type = genomic DNA
ccttaccttattaagtagggtaagtattaagtaataagtaatttttcacccagctagaactgggagagaatgtgtgcactattgtatggccccagaccacnttggcactgaccgttctctttcttcccattccattccccatgattgatcctgttgggtgtaaaatacataaggaacaaaaagctgctgaatctgggggga

SEQ ID NO: 727 - DNA, 201 bp, Homo sapiens
  variation 101: note = n = G or C
  source 1..201: mol_type = genomic DNA
atctaagactattcgagcttattgtgctggttacctagttctataaaggattatgagttgcccagttatcattttcctaaatgtctatcaataaatggagnccgagaaagagttcttttggggcagaaagaatgctatagccacatgtaaatatccaagaaaccatggaagctgcaatgcacattctagttttaatataaa

SEQ ID NO: 728 - DNA, 201 bp, Homo sapiens
  variation 101: note = n = A or G
  source 1..201: mol_type = genomic DNA
actgatctaattttgtaaagtggataaactccagagggatgtgatagatgttgttcattacacataggtaggtttgggcaaaaatcattgattttgaaatnccaagatttttttcctggtaccccaaggaagtcttctagaaccaatagaaaacttgtagacagaaatacaagtaaaagagtccacccatttgtatgcaga

SEQ ID NO: 729 - DNA, 201 bp, Homo sapiens
  variation 101: note = n = G or T
  source 1..201: mol_type = genomic DNA
tttattgcaataccattttcctggtgagtcagttgcttgtgcagtgggcaggaagaacctgttgggtgatcacaattacagtataccctaacgtgaaatanaagcactctagtaggataaccatatttcactttagttttcacctctgttctcatgcagctgaggatttgttggttgtagtttgaggtagtggtcccaggc

SEQ ID NO: 730 - DNA, 201 bp, Homo sapiens
  variation 101: note = n = T or G
  source 1..201: mol_type = genomic DNA
tatttgtttaaacaataaaatgacaacccatatgtcaagatgatcacaccacaagaggaatgcagcgagctgacagttgaaattacataatttaaatgagnatctgattccaaaacagtgtatgagaacaaagtgatttctttaaaataatttataataaacactaaggtttgaacgtctaatggtccaaaatattcaaaa

SEQ ID NO: 731 - DNA, 201 bp, Homo sapiens
  variation 101: note = n = G or A
  source 1..201: mol_type = genomic DNA
attatcctctatttttattaaagcctcagattattaacattgcccatgatgtgtcattgtccaatgagataaaccgtgtttatatcttacccaattctttntaaggtacattccacctagaatgactcatttttttcttttgtgttatttcccctcttaatgcgtttgcatataacactaccttacgtaaatcacatgcta

SEQ ID NO: 732 - DNA, 201 bp, Homo sapiens
  variation 101: note = n = C or T
  source 1..201: mol_type = genomic DNA
tgtaaaaacctatacatccatctccatggtttttatagctcccaccatgctgaccaccatatcactggcaacactataattcagggactggaaaataaggnagaggtcacctccttcagcatcgtttatgatctctccattgtcctgttttccaagaagattctggacactgctctaatacatctagtacacaccacactt

SEQ ID NO: 733 - DNA, 201 bp, Homo sapiens
  variation 101: note = n = G or A
  source 1..201: mol_type = genomic DNA
actacaatcacttcaaacaacatagctccaaaatctgtttcaatagttggaaaactggtgcgtttccataatttacacatgaaattaaacaaatgatttgnaatgaaagcttcatggcatttagtaagacttagttctttaaaaaaattattaattgaacagttggctgagtttattataacagtccttccccacatctat

SEQ ID NO: 734 - DNA, 201 bp, Homo sapiens
  variation 101: note = n = A or T
  source 1..201: mol_type = genomic DNA
aaggacagaaaaagtatttgctctgaaaactgaagaagaaaatgtttggctcagttcattctttctgtaattccatgggaattttatcacagaggaagaanctagccctgtcgtatttctttatgaaacactattctatgtgtatttttaaataataactaaaaatactcttcagagaatgttagaaataattcataaaaa

SEQ ID NO: 735 - DNA, 201 bp, Homo sapiens
  variation 101: note = n = C or T
  source 1..201: mol_type = genomic DNA
agattccagaattctctgctccaggattcgggggatatgttgttagactctttgagcctggaggcaattagcaggagaccagaaaaaatgaagaggatcgnaatcaaattgtaaaagctgaaaccagccagaaatgtgaggttgaacgtgatatttttgaaagagaaaaatatataatataataagaaactgtctcacttg

SEQ ID NO: 736 - DNA, 201 bp, Homo sapiens
  variation 101: note = n = T or C
  source 1..201: mol_type = genomic DNA
tggtgtctgcaagttggaagttgaaactatcttttgtatacttcttttagctattatatacttgtgcctatttatttctcagtaccagaaaatgtgttccngaagacatattcttcattgcacagttcagagaaaatcttgtatcctcattgttgaacattcaaaataatagtgtgattattctattactgtacttgatag

SEQ ID NO: 737 - DNA, 201 bp, Homo sapiens
  variation 101: note = n = A or C
  source 1..201: mol_type = genomic DNA
gaatttcaatattatttgatagtttcattttattgtattaaaactctgaaaaattatattattagtaattcaaattggattttcagggcagcctatggtcnaaagccataaggattttatcttgagaacaaaattagatcatgattttacatgtacagacatatgtgtgggtataaatttgtaatttttagtcagtattgc

SEQ ID NO: 738 - DNA, 201 bp, Homo sapiens
  variation 101: note = n = G or T
  source 1..201: mol_type = genomic DNA
aaacattcctccgtagtaatcacaaaaataacagtgaaaagaaaagaatgaggactttgtagaatccagattcaagacttactctatatgttgctgttatnattatccagactcacatggattcacaagagtgaaccaaaaccacaagaaactatttaccacattgaataccactttacatcctcatctaaggaagatcat

SEQ ID NO: 739 - DNA, 201 bp, Homo sapiens
  variation 101: note = n = A or G
  source 1..201: mol_type = genomic DNA
ttgctctatgtgatactgtttagtaagatatattgaatgagtgaataggtgtatgtaaaaaaataatatttatttttctgagttaaatattctcatcaagnaagtattttgctctcttctctcaggcttggacttaacctgttactgtcctgcttgaataccttttaatgtatttaatcttttctgctgctttgtttattc

SEQ ID NO: 740 - DNA, 201 bp, Homo sapiens
  variation 101: note = n = C or T
  source 1..201: mol_type = genomic DNA
aacggaactcagagatcaactcagatttcttcagtccgtaaaactaagatgaacttttgggttcattactacttgttgtcatgtagatgttcaattccaantcaagagttctgtattccatgtgattaaataattctatgtgattccacaattaaaatgtggctgcaactgcattcagttcagtcccagtcttacatggta

SEQ ID NO: 741 - DNA, 201 bp, Homo sapiens
  variation 101: note = n = G or A
  source 1..201: mol_type = genomic DNA
attaaatatattacagtgaccaataggtatgtcattcagcactattagatttcccagaaaatattaaactgatctttgaacattatattccagtgtcccangatataaagaaatgaatgaaaaataacttgaaacacagatgctgctagatgagagaaagaatatgataaaattggaggaaaataaaaccatagctgtgga

SEQ ID NO: 742 - DNA, 201 bp, Homo sapiens
  variation 101: note = n = A or G
  source 1..201: mol_type = genomic DNA
ctaggataacagaaaacaaacaaacgaacaaacagacaaaaattttagcccctgtcctaacaatgtcattttttccgttcaggtgcaggatacaaattggntgccttctcagggcctcttcattcctccctcctccttgactccttggctgattcccatggaagcgaagaggaagagcaatttaatagagttattctatta

SEQ ID NO: 743 - DNA, 201 bp, Homo sapiens
  variation 101: note = n = A or G
  source 1..201: mol_type = genomic DNA
gagaacattttatgtctatagtaaaagagaagagaaaacaggaatatcagggtaattcttgctagcccaacctacacagctaaatttctggcaaatagtantggtatagaggcagagctggcttcatgggtctatgacctatacctttacgcagattgttacgtttggtttaattgcttgtctcttgccatactgaaattc

SEQ ID NO: 744 - DNA, 201 bp, Homo sapiens
  variation 101: note = n = G or A
  source 1..201: mol_type = genomic DNA
tcaaccttataccttacaaactgacacctaattttagtctatgttcagattttatataacttttactctcaatatagtttaattgtgataatgaatcaaantgatacctaggttaaacacttgttagttttcctattcattttattaatgaaaactttaacggtgacaaagattctaaaattttaatagagcagaatgttt

SEQ ID NO: 745 - DNA, 201 bp, Homo sapiens
  variation 101: note = n = A or G
  source 1..201: mol_type = genomic DNA
tggtctagaaagaggccaagaaatttgtaatgccctcctacgataccaagaagtcactaaaggaagtcactaatttcctcctttgtccttatcctgacacngcacaaagacagaactttgaaacataatttggttttgaaacacttaattaccttccccattgatacaaagggaaagatgaaacccatataacagcttcag

SEQ ID NO: 746 - DNA, 201 bp, Homo sapiens
  variation 101: note = n = A or G
  source 1..201: mol_type = genomic DNA
catagtgagcattcttccttgtaagatatctgcaggggtctcagtggtctttagctgaagagcattgacatttcctagccctttaaaaaactggctgtccntaattggtaaacatgaataactcagttaataaaatgctaaattgacagaactcccattctccaattattccagatcaattatatctattagctataccaa

SEQ ID NO: 747 - DNA, 201 bp, Homo sapiens
  variation 101: note = n = T or A
  source 1..201: mol_type = genomic DNA
accagtcctattccaatcagctgtggtctgggtgataaatttctgtggtgtaaaacatgatgatctaaggctgcctctacagaaggagctattttgtgttncatgaatcacttgtaatgaccagattgttgaatttttctagttgaagatttgacaacaccatttttatgtctgcttttaatagttcatccctatctgttt

SEQ ID NO: 748 - DNA, 201 bp, Homo sapiens
  variation 101: note = n = G or C
  source 1..201: mol_type = genomic DNA
cgcaataaagctattttggaattagacattatttatttggagagagtagatttatcaccttgcttcacactttctacttctgatctctcttggtttgcctnttagcttttgggggagtatttctttttgataatcatcgttatctacttatctcagtaataaagactcttgcactgttttaacatgttagatggttagact

SEQ ID NO: 749 - DNA, 201 bp, Homo sapiens
  variation 101: note = n = T or C
  source 1..201: mol_type = genomic DNA
agagacgctgtctcaaataaataaataaataaaaataaaaaagcaaacagattcagaataggttttacctcattttttagaaaacccatgaacccaatggnaatttaagggatacaaattaatacagaagaaagattctttgagaaacaacagtgcctgctgccaaacaaggaacataggaaaaaaaaaagaagtcaaaaa

SEQ ID NO: 750 - DNA, 201 bp, Homo sapiens
  variation 101: note = n = G or C
  source 1..201: mol_type = genomic DNA
aggtacaatggcaaaacacagttatgtcaataccatttatgaagaacaaattaaaaaaatacctccttcataaaatcaatagcaaggcagagaaaatcaanatgaatgggcaaaggagagtaggtaacccggataacaaatgagtggaatctgagcgcacacctgcttgagtgagcataggtaaacaattactggctgaat

SEQ ID NO: 751 - DNA, 201 bp, Homo sapiens
  variation 101: note = n = A or G
  source 1..201: mol_type = genomic DNA
ctgcagaatgcaagacactgtggcatcttacaatagttacaaaggcattagcacaaggcagatttatttgtttatttatgtcccctataaaccacagctanactgttttttattgattttttttttaaatttgccttgacctcttttttctaaattccaaaatattaagattcttattcagcagatttgagaagtttttaa

SEQ ID NO: 752 - DNA, 201 bp, Homo sapiens
  variation 101: note = n = A or T
  source 1..201: mol_type = genomic DNA
cttacaatagttacaaaggcattagcacaaggcagatttatttgtttatttatgtcccctataaaccacagctaaactgttttttattgattttttttttnaatttgccttgacctcttttttctaaattccaaaatattaagattcttattcagcagatttgagaagtttttaaatgtaataaagtggttttgattgtag

SEQ ID NO: 753 - DNA, 201 bp, Homo sapiens
  variation 101: note = n = C or T
  source 1..201: mol_type = genomic DNA
cctagctataggagtagaagatgagtatagatatcatggagataaatttttgtaaaaacaaattttcctttcaagttttggccaatgcttttgctgcatantgttgcttttcatatttttattgttagcaacatgataaaactatgtcagtaagtgggttagctaatataggtagggtatcctttatctgaaatgcttggg

SEQ ID NO: 754 - DNA, 201 bp, Homo sapiens
  variation 101: note = n = T or G
  source 1..201: mol_type = genomic DNA
ggccaaaagtttttccggaagcttgtcctctaccttgaagttgcctaccttttcttctcaccacataccagagtgcagggggtggccttccagtcatatcnttctcctctgcctcagtttccctgtctttggatccattaatagaggaaaagaaaggcagatctcattgatggagtggaatgatactttcccagcagtcag

SEQ ID NO: 755 - DNA, 201 bp, Homo sapiens
  variation 101: note = n = C or T
  source 1..201: mol_type = genomic DNA
agttttattcccagtccaagacgatccttcatcactattttctcattggaagaatgattccccttcatttggaagcaactggcagatgttccctgctgagntggctctcggttttggtggaatgctgcggtgttgaaatgccacatgtacaattgacttttcttactcttcccactccccgttctggaaattgcttccact

SEQ ID NO: 756 - DNA, 201 bp, Homo sapiens
  variation 101: note = n = A or G
  source 1..201: mol_type = genomic DNA
gcttacggttatttgattggtaactcaaatgatggatattgccagttgtctcctgtgagagagttagaggttacttaagctatgatttttcatatcaaatnaaaaaaaacctaaacttctgatggctctcatttgcctatatttcaaacttgaaaagagaatgagaaacattaaggaaatgatataagtgtgctttgtcca

SEQ ID NO: 757 - DNA, 201 bp, Homo sapiens
  variation 101: note = n = G or A
  source 1..201: mol_type = genomic DNA
atgctcttatcttcttattctctgtgtatctgtgtcaatttgacttttattcaaacttctcaagagaggatccaattgagtgggcttgtccagtatttacntctcttgctgggtaatgcttgtgctgagccaggtgataggccactggtctctctcatgtcaaactttgggacacactttgattcatggtggccagacttg

SEQ ID NO: 758 - DNA, 201 bp, Homo sapiens
  variation 101: note = n = C or T
  source 1..201: mol_type = genomic DNA
agtgttgctttctcccaaaagacctcctcccatatgcaggctctttcaacatcactcagtcaacatactgtgtctccttctagcccatctcctgccctgtntcttattaacattttgcctgtcacactcttaatttctctattattcctttctttctatccagcttgtctgtttgtaagaactattctatatgcccactgc

SEQ ID NO: 759 - DNA, 201 bp, Homo sapiens
  variation 101: note = n = A or G
  source 1..201: mol_type = genomic DNA
tccctaatgaataagtgattgggagaattctttgccagaatttgttaaggagaatatatctaccgagttccagaatttatacaattcttttttctgaattnactgatcctcttgtttttatttagataatttaggattcacattgttccactgaatggtcaatttcttgcttcatatcttttaacatccaatgcagaaaat

SEQ ID NO: 760 - DNA, 201 bp, Homo sapiens
  variation 101: note = n = T or G
  source 1..201: mol_type = genomic DNA
gttttacacgtggccacttaactgatgagaaaaatatcttctgaggaatatgtcagccagtaagtggaaattaaatcatgacaaactggagcaactgttcngattattcaggtaaatttaaagcaagtccatatgcaagggaagtgaaacacattgatgttttagattacttaaattaaaaaatgttcagcatgtgatttg

SEQ ID NO: 761 - DNA, 201 bp, Homo sapiens
  variation 101: note = n = G or A
  source 1..201: mol_type = genomic DNA
tatatccaccttcaaaaagagagaagcttaattgttaatatgcctcactctgtggtgcttgactatactgtttcatttctccctcttgatagtctagtgancttgaaggaggctggatcttcaagtacgttgaacaatgggcccagctgtgagccctggagagagtaatccaggtatgagtatgttgaaaatagcaaacca

SEQ ID NO: 762 - DNA, 201 bp, Homo sapiens
  variation 101: note = n = G or A
  source 1..201: mol_type = genomic DNA
ctctctgtataattctagatgtttcgaattcaagtttatttatacataaatgcgttatttctaaagactagacacttgtgaaactgaattacaatttcctnttgaatcccttcatggagtttcttaaatataaatccacctcaatcttatgtttcattgtacatatttaactatataaacagtgtacacatgttgattatg

SEQ ID NO: 763 - DNA, 201 bp, Homo sapiens
  variation 101: note = n = G or A
  source 1..201: mol_type = genomic DNA
ctgtgattaaagttccttattatcaaagtttttggttgttcaagtttaaactaatgtaagtttgaaaactccaaattataaaataatttgtggggctcacnttgtttcaaagattacagtaatttattttgcacatcacttttgaaaacctaaacctctcagtataaacataataactttgtaaataatgtttagttgatc

SEQ ID NO: 764 - DNA, 201 bp, Homo sapiens
  variation 101: note = n = G or C
  source 1..201: mol_type = genomic DNA
ctgctcccagccttcatttattttaaaaatgaatttgaataattagataaggaaggtcttccagaagtaataaggagaagtaaagtaatcgagtcacaaantatgtggctttggaattcaagtataacatgtatatgtgtatccattatgacaatatatattgcatatcttgatagtatttaacttaccctggtttgactt

SEQ ID NO: 765 - DNA, 201 bp, Homo sapiens
  variation 101: note = n = T or C
  source 1..201: mol_type = genomic DNA
agaagctatatgtttaagcatagatgccataaaaaggtagattatttcatttctcaaatttaaaaatgttgaaaacttttcttaagaaacctattccctangatagtgttattactacatgcctgtttatccctaacatgtttatattttcaagataatgaaaagaaaatccccatctatgccatgccacacttatagata

SEQ ID NO: 766 - DNA, 201 bp, Homo sapiens
  variation 101: note = n = C or T
  source 1..201: mol_type = genomic DNA
aaggcttactgagattatatgattaacttactctgcagtggagaggaggagggtaaacagaaggagatttgaccaacagctgctgccaagctttatgactnggaggagataagggttgtagatgtatttattatcttctgtggaaagaaaaatgatcttctgtggcaaaattcaatcaaatctacattatctaattgaagc

SEQ ID NO: 767 - DNA, 201 bp, Homo sapiens
  variation 101: note = n = A or T
  source 1..201: mol_type = genomic DNA
ctgctgggtgaaaattagagtcattgctctaaggatatgccctgcaatgagaaagaaaatgtcatgctgggaattacactaactcatataagttttcaagngagtttaatggaatttttaactaaaaatattctcattttacaaggtaattcacaaataaaatataattcaaataagagaattttggtttaagggcaattt

SEQ ID NO: 768 - DNA, 201 bp, Homo sapiens
  variation 101: note = n = G or A
  source 1..201: mol_type = genomic DNA
tcaccaatgatggctttacacaagtagatacaatgaaacttggaataaaatattgcatttactgtctaaacatttgtatctagcccaagcacaaataaatntactactttggcatgagcttgaatcccagacatgattatgattcagattacaccagaattttaccagaattcagcaagttttctacattttctctcttct

SEQ ID NO: 769 - DNA, 201 bp, Homo sapiens
  source 1..201: mol_type = genomic DNA
  variation 101: note = n = C or T
gccctaacatccattcaatctgcaaaccaggaaaagtagtcatgataaaaatggcattactaacatgtctggagatatttttagcttataagctcttgtangaatgtatctgtccacttagaatatcagtgaaatgtaggtctgagaatataagcctgatgataaaaactccctcattttcttgtacaacaaatctaacag

SEQ ID NO: 770 - DNA, 201 bp, Homo sapiens
  variation 101: note = n = T or C
  source 1..201: mol_type = genomic DNA
cagcgatttattgtccttggaatttatggtcattttgtgggcaaatgtaaattgccattttctttcagcacaatatgttataatttcagagctatttaagnaatgcaccaaaaaaaagcacagagagtagataaatggaaattgctaaaagtaattcaataaataacaatcaaagcaggacaatcaaaaaggaaagtcttg

SEQ ID NO: 771 - DNA, 201 bp, Homo sapiens
  variation 101: note = n = T or C
  source 1..201: mol_type = genomic DNA
gtacaggaagattttctttgtaaaatgtagttaatagcagctggttcacatttttcctaccaatgtttgctctgagaaatgctgtacatatatgaattcangtagctggacatatgcatgtatataagcatcacctgctagcctgttgtgccactggaactcccatatacatgtatatagaaaaatcatatcatcctgttt

SEQ ID NO: 772 - DNA, 201 bp, Homo sapiens
  variation 101: note = n = G or A
  source 1..201: mol_type = genomic DNA
ttggcattcctaactcttcttttattcacagtgacacctttacttttagtcccacaagcctagggaatgacagcttaaggttgtgggggcacctaagatcnaaggagctggtcacagctgcttggagctgaatgccacttggggctagggcagcaatggcataggggtcacaggcctacttctgatctatctttaacattt

SEQ ID NO: 773 - DNA, 201 bp, Homo sapiens
  variation 101: note = n = G or T
  source 1..201: mol_type = genomic DNA
agatgacaaaagtatatcttagtttaaatttgctcagagttgcataaggtcttttagaacgctccaaatcaactctgattctcacacacacagtggcgttnaaatgcaaattatattcttaactattgacaaaaggccaatatagagtacacacagaataagctatagcatggtttttgttaagagtaaaagccaaagtca

SEQ ID NO: 774 - DNA, 201 bp, Homo sapiens
  variation 101: note = n = T or C
  source 1..201: mol_type = genomic DNA
gtggctaaagaggtgagatttggtgtatgggcacatgtggggtgactatggcactaagggcatgggcatgcatgatgctgggaagggtaacagctccagtnccaggaagatacaatagcaacttctttttgcagtatgttccagagggaatagaacagggatgactgttggttacctcaatggcaaaaattgtcaatgtca

SEQ ID NO: 775 - DNA, 201 bp, Homo sapiens
  variation 101: note = n = A or G
  source 1..201: mol_type = genomic DNA
atcaatgccagcatctaagcagtgtgcaccttttgaccatagtctttctaattgaccagaagcttagatgtggaaaatgcaaaaactatgcacatttctgntgggtttaacttctgagaaatttttacaaggttttccttattttatctgctccagtaaacctgtggtttcatgaacaggcctagaatttgagattcagct

SEQ ID NO: 776 - DNA, 201 bp, Homo sapiens
  variation 101: note = n = C or A
  source 1..201: mol_type = genomic DNA
ctagggataagcaataggattagcaatgtgttctaccttcatttctcaagcaagacttgagccaattaaccatgagcaagacggctttgccatggtaagangcacttgttaacaattaaaaatgaaaatctctttcatatgactggatacagctctttaactcagtttaatggagcattcaatgtcaatataatttgatga

SEQ ID NO: 777 - DNA, 201 bp, Homo sapiens; identical to SEQ ID NO: 776
  variation 101: note = n = C or T
  source 1..201: mol_type = genomic DNA

SEQ ID NO: 778 - DNA, 201 bp, Homo sapiens
  variation 101: note = n = C or T
  source 1..201: mol_type = genomic DNA
atgtttcttaagagtagtcaataacttaccatttagaaataaattaattctttaaagggaatcaatgcttccttgttctaaagtgaaaacacaaataacantctcactatggattggcctatatgcccatccacatgtatatatgatcctgaaacttacacagcagtacagtggttttgtggggatttttttttccttctt

SEQ ID NO: 779 - DNA, 201 bp, Homo sapiens
  variation 101: note = n = T or C
  source 1..201: mol_type = genomic DNA
atttacatgtaagagtatgtaaggaaatgcttgtaatgtgaagggaactattcctagaaaaaaattgagaagtaggacaagtctctttttgtgtcctcccngcacgtcctcccagcacttccttctgtttcccaaggaagccactatttcctcattgcccaagttccttcctataacagcaaggaatgtaggaaatgacat

SEQ ID NO: 780 - DNA, 201 bp, Homo sapiens
  variation 101: note = n = A or G
  source 1..201: mol_type = genomic DNA
acacccagcctaaaataattattaatagttaattccccaatgggtttttttggttattgaatactaagaaaggcagtgtaaatgctagccttaagtcattnggaataaactgaataataatttaaaaacacacatttacagtttgtgaagactcacatatctctggtttaccaaataaagagaaggaaataaaagaatcca

SEQ ID NO: 781 - DNA, 201 bp, Homo sapiens
  variation 101: note = n = T or C
  source 1..201: mol_type = genomic DNA
gattgccaaaatattgttgtgccaaaaatagagttttaaaaaatgcatgagtgcacaaacaaacacaagctcatatacctacacacattctgaggaatctntgctctttctaggaaagtttttgagagggtttttatccttttacatataaaaatgtaaaatagagcactgtcatataatttagacagcaacatttcttaa

SEQ ID NO: 782 - DNA, 201 bp, Homo sapiens
  variation 101: note = n = C or T
  source 1..201: mol_type = genomic DNA
ctcaggcttgagaattgtaactcaacctatgaaacattagtgagctttcctttactatgtaactttgtcctataatactttaggcctaaatagtttcaagntcaaacagatcataaagatatctctgtcttttaaaattgaacattcgcccagcatcgacgagatagaaccggagatatagagcaagagatgaaaagttga

SEQ ID NO: 783 - DNA, 201 bp, Homo sapiens
  variation 101: note = n = G or A
  source 1..201: mol_type = genomic DNA
gtggtgtagaaaggtctgtgaaatgctggcttgctcctccatcaccttccacttgtgtatgttgagagaattaaacaaaactctcattttggctgaaagtngaacctgggtttaaatgttttcaatctgaaccatgtttcctaaataaattcatgataacttgcacattcaaaattaaaatcaaggggctaatttgtaaca

SEQ ID NO: 784 - DNA, 201 bp, Homo sapiens
  variation 101: note = n = T or C
  source 1..201: mol_type = genomic DNA
gatggaggaatcccaactctgtgaatttggataaacccattatctaaatcttcttagttatttcgcagaatcttcctagatatctttccatgatctttccngcctgaggcctcttactggacccagttcaggttttgttagacccaatctgatgttgaacccaatatgactttcaaatctagtctggattaaaaatgatca

SEQ ID NO: 785 - DNA, 201 bp, Homo sapiens
  variation 101: note = n = A or G
  source 1..201: mol_type = genomic DNA
ctcttttcattatcttctaatttactataggcatgtctcctaacaaaattacctttcaggaaaatttagtcctctgaaaaacatttctctgggtgacagtntctcactatactttttaaaatcaaggcagtcttgttcatatttacgtattttcttctaatacattcagaatgtttaagaggatcctaagaacaaaactaa

SEQ ID NO: 786 - DNA, 201 bp, Homo sapiens
  variation 101: note = n = C or T
  source 1..201: mol_type = genomic DNA
atttgtaatgtttattttaaaataaaatccagattgctttgttagaacaagcatctatacacagtaaatagctgaagtcttgccacagtctcctcagcttngctgctcctgagagaccacaaacttgtcctggaacatgtgtaacctaatagcccagagtataacaatgatgacagggaatcagtcttggtctcaaaatat

SEQ ID NO: 787 - DNA, 201 bp, Homo sapiens
  variation 101: note = n = A or G
  source 1..201: mol_type = genomic DNA
attgcctcccctgatacctggagccatcaaggctgagcactgtttctccaaaacggatctgtgtctccaaagcttattgcatttccacagatcccggaatntgccatgagctctcttatcctcatatcctaccataagctctcatatcctcatgccttgttcagaactcgtacatctactcgtatcccctccctattgttc

SEQ ID NO: 788 - DNA, 201 bp, Homo sapiens
  variation 101: note = n = A or G
  source 1..201: mol_type = genomic DNA
aactaagaatccagagtttaaatagcttgtcaagcacatgcagtcaaagatgagagtgaagttttcagcaactttaaatgtgagagaaggcatagtggatngaaagacaaagtgtggatgaagatgagccagtgcgttggtggaaattgggtgattgcagcgagaaaaaatttcataagaataaaagttgctgaaggatgg

SEQ ID NO: 789 - DNA, 201 bp, Homo sapiens
  variation 101: note = n = G or A
  source 1..201: mol_type = genomic DNA
actcagaagatagcatgcacttatctttggctgagtctagatgctaggtgaattttgttccatacatgcactgctaggtcagctcactggagaaatcgcanttgccattaaatatgaaatgtactcaaagcactttcatcttgacataccccaggatttacctaatatgaaatgagatctagaatctacattttgatattt

SEQ ID NO: 790 - DNA, 201 bp, Homo sapiens
  variation 101: note = n = G or T
  source 1..201: mol_type = genomic DNA
ggttcattaataggtacattgccttttccctgtaggggaataaagacttaagtaactttcctgaatttcagcaatacggttaaattttttttatgtctatnttaaatattttcttctatttacagtatctttcacctctctctcccttgccccatccctctctccctccctccttccctttctctttctctttccttccat

SEQ ID NO: 791 - DNA, 201 bp, Homo sapiens
  variation 101: note = n = T or A
  source 1..201: mol_type = genomic DNA
tttcctttatcagatgtgaataatcaattttaagacttaaatatgggagcaggaagaactctttaaataaaggaaatcaaaacaagctactagaatcatgncttggaacttttgaagctcagataattagttgactgctgctgcctaatttcataattgtgaaggcaatggcactgataacagttgcaaaacattcacaac

SEQ ID NO: 792 - DNA, 201 bp, Homo sapiens
  variation 101: note = n = A or G
  source 1..201: mol_type = genomic DNA
cattgaccagctttcaaatgaaggtttttcctagggagggagcataacttttaagtaatccctttcttctcagcagaggtttattcctagagagtgattcngctttgagttttcggcaaccaacccctgcagtggcagggagaatgagagactcattcagatgggagaatagtactgttgaatcacagacgtactgagatt

SEQ ID NO: 793 - DNA, 201 bp, Homo sapiens
  variation 101: note = n = T or C
  source 1..201: mol_type = genomic DNA
tttagttttttttttttctgtttagtcagtatctgcaatgatatttttagacatcagttttacctaaattttaaaacttgttggtaaatttgaagacttangtattttatatttcttgttctccaattatgcaattttcattcttactactcttcactcacaatatctcattttagtacttattgttcaaatatccagaag

SEQ ID NO: 794 - DNA, 201 bp, Homo sapiens
  variation 101: note = n = T or C
  source 1..201: mol_type = genomic DNA
tatatatggaccacatttaaaatcctttttttcaatgggtaaaaaccccaaggaaatattttagctcctttcaacctattttaaaaacatcaccagtttcnaagtagcaatgtaaaatgaatgtgcaattaatagttctaagaaatgggaatagcataatattttcactgtgatgaacttctggcatttaaaaggacttta

SEQ ID NO: 795 - DNA, 201 bp, Homo sapiens
  variation 101: note = n = T or C
  source 1..201: mol_type = genomic DNA
gactaaaggaatgtttctttttttaaatccatgtcagaaaatagtattaaaggagttaaagagtttttactttaaacttatatcaacatatctaggttgcnaaataccatacatagaacagaacacataggcagtcgggagaggaagtcagatgcaaaagttcttatattattgtggttaaactttgaaggggttgtgtaa

SEQ ID NO: 796 - DNA, 201 bp, Homo sapiens
  variation 101: note = n = A or G
  source 1..201: mol_type = genomic DNA
ttagtcatttgtatggaggggtgaggagtcaggacaggggataattatttgctttttatttttatttatttaattttattattatattgtaatctggaccngctacaagtatgtgtatataacctaggtaaaactacacgtaggcttttggcacctgtggttgcctgtcagcttagtggagctcctaaccatctaaaatgt

SEQ ID NO: 797 - DNA, 201 bp, Homo sapiens
  variation 101: note = n = C or T
  source 1..201: mol_type = genomic DNA
cacagcaaaaccctctgctcacccacgacctggagctcattagaataaagcaagtgaggtgaagcctggagtctggttcagcagtagcatgccatctgccntctatttgtgaccagaaagcccatgcaaatgaactacagagtgctaaccgtgtgttaatacacagttagtaaagatgaaagcgttccaccccatctttaa

SEQ ID NO: 798 - DNA, 201 bp, Homo sapiens
  variation 101: note = n = T or A
  source 1..201: mol_type = genomic DNA
tgcacgaatggggttggaatgggtctttggcagaaagcagtggcatctgtcatctttgcttcaccacgattccagctcagcaccaggcctctggtagcgcntttcctcctcatcacatttgttcctgttgactgaccagattattgatcgctctgttctgcagcactgggtgggttaagcttggttgcctccaggcctctg

SEQ ID NO: 799 - DNA, 201 bp, Homo sapiens
  variation 101: note = n = T or G
  source 1..201: mol_type = genomic DNA
tcatgtgagtgaattcagaatcaagttgaaaagatgaaaccatattcccttttaataacataaataaccactgttattcttttatgttatataaaattgcngcataaaataaatttcatcatttgtagtcataactttgaatatcctttctgaaacttaactttcccaactcactctcctaaagaagcccgcaccctcacc

SEQ ID NO: 800 - DNA, 201 bp, Homo sapiens
  variation 101: note = n = C or T
  source 1..201: mol_type = genomic DNA
ataccggattccagttgcacctcacctcacctgttctgtcctgcagcaggtgattatccatgccctggaatagttgagatgtggcagatattaatttacanaggcttaccaatcatttcaaaccctatcctggaaacaaagtttgaggcaaaggaggagtcaaggcaatggaggagctggcaagtaaagtcattaggattt

SEQ ID NO: 801 - DNA, 201 bp, Homo sapiens
  variation 101: note = n = C or T
  source 1..201: mol_type = genomic DNA
agtaactatcagaaattacagaaaactgttatctttgatcctgcacccaatgttagaataaaacttcctaatatctgaattcacagatgttctaattcacnttcagcaccaccattgatttcttgggtatggtaatatacaacagacactcagaagaattttattacttgcaagcatcttttacacattagttcttctccg

SEQ ID NO: 802 - DNA, 201 bp, Homo sapiens
  variation 101: note = n = T or A
  source 1..201: mol_type = genomic DNA
aggcaggctggcacattcgaagctcacattctgttacctccacagaacctctggggacaatgacagtgtcagtgtgcacagatgaggtcagaatgacgacnggccatctcacctaactcttgcccatcagctgttgtgatcgaaaatgtaaaagtaaatagaccccttttcactgcccgagtctgggtggacctcacctga

SEQ ID NO: 803 - DNA, 201 bp, Homo sapiens
  variation 101: note = n = C or T
  source 1..201: mol_type = genomic DNA
gggatgcatgttccacacatggcaatggatttggagaatacccaaatacgattctgtgaggatcatcaggcctttcacatcttcctgaggggatgggattngaagaatggagaaaaaggagagaggagaggtgagtttggagaatgtggtgtcttgaggaaatcagctctcaggtttgggcagggagccatatggtcctca

SEQ ID NO: 804 - DNA, 201 bp, Homo sapiens
  variation 101: note = n = A or C
  source 1..201: mol_type = genomic DNA
gctccatctccctccgagacaaagtgagactccacttgggcaacaaggacagaggctgtgactctgtggacacagatggagggtgaagaatgcaaacagcngtttttcctacaatctgggaattgttagaaagatttagtatttccacaatgtctccttaggtcagcgccaccaggctctgggcacacagaaagggggctg

SEQ ID NO: 805 - DNA, 201 bp, Homo sapiens
  variation 101: note = n = T or C
  source 1..201: mol_type = genomic DNA
tgaggcaggcaagcagggcccgtggtacaaatgtgctgagcaagttgtgatgagaaatgaacacaagtataatgaacaggaaggattttaaagatttctcnaccatgcacactctgttaacctttgccatcaatcaactcagagagcagagatacatagccctttgtccacagttgcaattcccagaatgggttccttaga

SEQ ID NO: 806 - DNA, 201 bp, Homo sapiens
  variation 101: note = n = T or C
  source 1..201: mol_type = genomic DNA
ggatgaagctgactgatgcccacacagagcagcagtggtgggaataaaggcaagtgagactgagactctcaaatggtgcagaagagttatctgacacagtncacaccttggtcattcagatctgctcctgccctccgtttgagctgttttattcacaatacttctgacaccaaatgtgtgattttttttcccttatatcca

SEQ ID NO: 807 - DNA, 201 bp, Homo sapiens
  variation 101: note = n = G or T
  source 1..201: mol_type = genomic DNA
ctgtatggatggggagagtgtagtcagggtggttaggggtaaggaagggccttaacttttttatcctatgcattttggtgttgctcaaaccttttataatnagacattcatgaactccttgagcattaaagtatatatctgcaaataaaatattgttcttgggaatggtgtatttttcccttttattttttaaataagtct

SEQ ID NO: 808 - DNA, 201 bp, Homo sapiens
  variation 101: note = n = G or A
  source 1..201: mol_type = genomic DNA
gtaactccacacaacttcaagtttacaaagtgttagttgaaccttaatctgtcaactctaaactcatacccttggtacaatcctaggctactctcttaggnctaactgctaagagagagttctttgagagtagaagaacagataggctagtcttttaggagttgttttagaataagaaggtgtaaatgtgtaagtttatag

SEQ ID NO: 809 - DNA, 201 bp, Homo sapiens
  variation 101: note = n = T or C
  source 1..201: mol_type = genomic DNA
attttgaatgtgattgggttacttatgtttacaatgttaatttaattttagtattggttgtagattatggttaaagttgaggcctgctggacacatcattnaggagttctggaaaagacagagaaaaaagatgacccaatggtggagaaatacacacaagggaaaatcatgggctagcctaggagatagaaaatattggca

SEQ ID NO: 810 - DNA, 201 bp, Homo sapiens
  variation 101: note = n = G or A
  source 1..201: mol_type = genomic DNA
taagatgctatacataagtcatgatgacctgggcattcaagctatcaaattcttttaaagtcttacccctgtgaggcaaggcagtaagagaatcccaaatnggatatgagtcatgactatagaccaaatgccttattatcctaaaaagaagcttaggccttactagagacagtccctgtgagctttcttatttctgtgggg

SEQ ID NO: 811 - DNA, 201 bp, Homo sapiens
  variation 101: note = n = T or C
  source 1..201: mol_type = genomic DNA
gaaaaaaaaaaaagaaagaaaattagaaaggtatattgtaaattaaatactccatgtaaacttaaaacaacagatagattcaatattgaaatggaaatganctaaattcaactaaaatgtaaagaaaaaaatgtatggagagaattatttttgagggggctatgtattcatatacaaatatttccattaatcactaacatt

SEQ ID NO: 812 - DNA, 201 bp, Homo sapiens
  variation 101: note = n = T or C
  source 1..201: mol_type = genomic DNA
atttgcataatgtaggcctattttctaatagttaacttgccgcttattactaaggatgttcatttccacatcttttccagccatatttagtttggaagtgnaatcccattgtgtatctctaatatatttttcaacataatacatctgctagatttcaaattacatttcagtgagtagttcttgtcttgtattcaaccccca

SEQ ID NO: 813 - DNA, 201 bp, Homo sapiens
  variation 101: note = n = A or G
  source 1..201: mol_type = genomic DNA
tgtgctgggcatcactgggttctaatggacgtgggcagagagggtgcaggtcaaggtggggagttagaataagaccagcccctcagtgaggacttccactncaataggacccccgtctcccatgatttacacctatcactcatttaatctccatagcaatccactgaaacagacacaactctgaccacaatttcatgtgtt

SEQ ID NO: 814 - DNA, 201 bp, Homo sapiens
  variation 101: note = n = G or A
  source 1..201: mol_type = genomic DNA
ctcctatgttcaattttcatttaagtaccttgacatatatacgtatttatctatatgtatttataaaatatatttaatttaaggaccttgaaattttcccnttttctgtcatttataaatgacttatttttatcctgttaatatatatcttaattatatatatcttacggcttctttgcatgtcagagttttttttgggta

SEQ ID NO: 815 - DNA, 201 bp, Homo sapiens
  variation 101: note = n = G or C
  source 1..201: mol_type = genomic DNA
cagtgagctgtgattgcgccattgcactccagcctgggtgacagagaccttgtcgctaaaacaaaaaacaacaacaaaaaaaaccttaaaaccttaacaangtcagtcttttcctggtgtggagttcaggaaatgagattcaccccatgggtcatgtgcacatgtttgttctattaggaatgaaggaacaagaggaccagg

SEQ ID NO: 816 - DNA, 201 bp, Homo sapiens
  variation 101: note = n = G or T
  source 1..201: mol_type = genomic DNA
aatttagacctgggctgaggagcagcataccacgtctagactcccctcctccctttctagagaggcaggcactcctaaaactgccagtctgaaccccaagnctctggacaaactattggagagggctgcaggagcagatacacagccaagaggtctcatgcttacaactaggtgctcaggattttgccatagaacacagga

SEQ ID NO: 817 - DNA, 201 bp, Homo sapiens
  variation 101: note = n = T or A
  source 1..201: mol_type = genomic DNA
tcagtataaaaaagtgtatgtgtgtgtgtgtgtgtgtgtgtgtgtatgtgtgtgtgtgttttaagtttacaggtccatggtttcaacactctgaaaaatcnttgtattaggcatagagaactgacatttactgcgtgccagtcaaatcatttcatactcatgacaaccctgtaagataagtatctctgattcaaggtatgc

SEQ ID NO: 818 - DNA, 201 bp, Homo sapiens
  variation 101: note = n = T or A
  source 1..201: mol_type = genomic DNA
ccacccgtctcggcctcccaaagtgctgggattacaggcgtgagccactgtgcccggccagtaagagctcacttttagggactggtctaaaaaatatgccnccctgtgaatctatgaggtgagtattattactaatcatattttacagattaaagaaaccacacagggccaggagcgatggctcacatctgtaatcacagc

SEQ ID NO: 819 - DNA, 201 bp, Homo sapiens
  variation 101: note = n = C or T
  source 1..201: mol_type = genomic DNA
tagagcataccacccaaatttcaaagggaggtgtgttcctaccatgttccagaaggcgggaaaaccagagtatttggtaacagctctaaagtttactacanggaaaaaaagaaaaagcctttaaactgtacgaagtggtattttcttttaataatttctagcatcaacacattctatttaacttctgcataacattccata

SEQ ID NO: 820 - DNA, 201 bp, Homo sapiens
  variation 101: note = n = C or T
  source 1..201: mol_type = genomic DNA
actggcgtgacctgacatataatctcatgggtttcatggatctgtatccctgggcatttatgccctcactctcctgtacatctaggagactaagagattancacagaatgactatttctgcctcagtctggagcaagattgaacaatggtcgtctgactgaagtcactccataaggagtacctgtgactgtggaacatctg

SEQ ID NO: 821 - DNA, 201 bp, Homo sapiens
  variation 101: note = n = A or G
  source 1..201: mol_type = genomic DNA
gatacagctgtcctaatgatttttgaattccctttcctagaatgctgtaattgagatgaaaactgacataattttaacatgttccaattctaaaatacaantttcccattaaatgcaataatcactcagaaatctaactaattaattccatccactttggaacaaagtttcaggttttttttccttaaaaagtcttatgta

SEQ ID NO: 822 - DNA, 201 bp, Homo sapiens
  variation 101: note = n = C or T
  source 1..201: mol_type = genomic DNA
tgagacaaatagcagtctattctcacctcttgttcctttatgacatttctaacgattatttttaaaattctaatatgtacaagttcatagagaatttcacnttttcaaccttatgacattcaattcctgtttaatttttaaaaattcttgatgcgtagccataatctactgtaattaatttcattccatttctagaagaaa

SEQ ID NO: 823 - DNA, 201 bp, Homo sapiens
  variation 101: note = n = G or A
  source 1..201: mol_type = genomic DNA
atttatatttgcatatattcaaattaaatacattttatttgaacatttctgcgacagagctaggcatcaccatgtgtttaaaatgcatcacattttttgangattatgaatgttgtcaatgttgtaattctataacatacttaaaataaatatgtgaaatgcatttcattaggcacacaacatatgcagccgacggaaaat

SEQ ID NO: 824 - DNA, 201 bp, Homo sapiens
  variation 101: note = n = G or A
  source 1..201: mol_type = genomic DNA
ttttggtcaggtcagtttgaatgactcctcattgttgattacaaatgtctaaataacattcccatctatgcttacaatgtcagcttccctattaaccttcnaaaatgatttgaagaaaaagcaattcaatcatttctattttgtaccaccaaaaaaaaaaaagagagtactgctttgtagtatgaaataagtttcatcttg

SEQ ID NO: 825 - DNA, 201 bp, Homo sapiens
  variation 101: note = n = G or A
  source 1..201: mol_type = genomic DNA
aattttgcatcttaaatttaccagtgagggctcattttcagtcaatatcttcacacagttatcatcataatcaagtcctaaattacaattctccgtatttnagttatatgtcataaattttcatttttctgggtttgggctttagctgtgctataattgtcttgacttttctctatatcttcatattatatcttaataaca

SEQ ID NO: 826 - DNA, 201 bp, Homo sapiens
  variation 101: note = n = A or G
  source 1..201: mol_type = genomic DNA
ggcaacaaaagccaaaattgacaaatgggatctaattaaactaaagagcttctgcacagcaaaagaaatttaatgttttttcaacatatttcagttaaacntggcttacctttataaacagcatatttatttcaagctataaatatgttttataatctgtaaatttttagaaattttaagtctagcgatgaagctttcata

SEQ ID NO: 827 - DNA, 201 bp, Homo sapiens
  variation 101: note = n = G or A
  source 1..201: mol_type = genomic DNA
atgttggaacagaatccataatgggaagactaaacactgttaatactccgaagtttggtgtcaacctcctcttagctgcattttttaaaactatgtctaangagccaacagttcattaagacatcatgagtcatccattcttttccctttttcctttaccatcatttttcccttggcaatagagaatataattttaactga

SEQ ID NO: 828 - DNA, 201 bp, Homo sapiens
  variation 101: note = n = T or A
  source 1..201: mol_type = genomic DNA
gaaaaatagtatagttagtcaattcccaaggttgtttcaatctttcttttattgcctgaaaagtagcttaacttaaaatcacttccttcaaattgtttcangtcaaatacttctggatgacatttcagtttctacctaaaatttaatatttggtactaaagaggatgatatataatttacaaaataaacatttgaagatag

SEQ ID NO: 829 - DNA, 201 bp, Homo sapiens
  variation 101: note = n = A or G
  source 1..201: mol_type = genomic DNA
acacgtggggattcagaggattatcaggattaaggggattacagttcaagaggagattttgggtaggaaaacagccaaactatatcagtattctttattantagaagtcacttctggattttaacatgaacttgcctgtccagcctttgtttttggttctattctttttcacttttttctataagttcacagaaacctttg

SEQ ID NO: 830 - DNA, 201 bp, Homo sapiens
  variation 101: note = n = T or C
  source 1..201: mol_type = genomic DNA
tcctctgctctccctctacccagtgaattctactcatctttcagtcattcctccagatgtttttctaatccacttaccccctcctcatctatagctgagtnagatgcccctcctatgcttacttaagcctctgtgcctttctcatgtcaccaacctacccagttgtctttttatctattcatatgtccttattacttatat

SEQ ID NO: 831 - DNA, 201 bp, Homo sapiens
  variation 101: note = n = T or A
  source 1..201: mol_type = genomic DNA
cagctatgatggcacaaaaagttcataattatactgatataaacatgattatgtttacatgtctagaaatagagtgtaccattttattacttataagggtnagtgacagaacacttaaagatacgttttgaaagagcaaatgcggtgttagctgcatgactcccattaaagtcaatgagaatcacgccgttaaaacactgt

SEQ ID NO: 832 - DNA, 201 bp, Homo sapiens
  variation 101: note = n = C or T
  source 1..201: mol_type = genomic DNA
tcgtaatttcatcaagaaatataatatatctctatttattctatcaagaaaatattttgacaattcaaatcagtgaacgcaaaactgccaaaatgaccaantagttttttcctcatgctgtgaaaaactgcattaaatctgtgatatgtcaaacaatgttgtagctacctgttgttatccctatgatgtatttgagataaa

SEQ ID NO: 833 - DNA, 201 bp, Homo sapiens
  variation 101: note = n = A or G
  source 1..201: mol_type = genomic DNA
tcctcctctgtctcctttccctccccaccatgccctgaggaaagcctcctttttgcctgaatgcaattagatcctgtttccgttttttaggtaaagacaanagtggtaaagggtgaggaattttacaagtgctggccatagtagctgtctatctgtgctgctgcttctgtatttggctgagcgcatctatctcttcctcct

SEQ ID NO: 834 - DNA, 201 bp, Homo sapiens
  variation 101: note = n = T or C
  source 1..201: mol_type = genomic DNA
ggtagagtctgggttccttgtgcagcaatcgtagccccatgaactggtgtataaatcagactctgaacttaaattacttcaatcccaagtcttctgtgcantattgttagggccctctggttagagctgtatgatgccgttgacttcaagatcattaatgcacaccccttagattttccaacctaaaattaaagcagtgct

SEQ ID NO: 835 - DNA, 201 bp, Homo sapiens
  variation 101: note = n = C or T
  source 1..201: mol_type = genomic DNA
taatcaggagcattttatcttttattctgtagcaatagtttcagggggtcttcctacatggattcacatagaagtggtcagttaagaacagtatttccccnggtgggttccacagaacagcatgttatgtgaaagaaaacaggctgaggtcaaatgaatcagggaaacaacaggcaaaacattactaaactttctgtttag

SEQ ID NO: 836 - DNA, 201 bp, Homo sapiens
  variation 101: note = n = G or C
  source 1..201: mol_type = genomic DNA
acccaaaatgaaagttggagaaaataataaataaaataatataaagtaaataaaataaaatattggtacataagtgcaccagtatgtatctaagttgaaantggacttctcccctgtagggaggggtgtgtgcgtgtgtgtgtgtgtgtgtgtgtgtgtgtgtgtgtgtgtgttcccaaaactctttgtatagtttgaggc

SEQ ID NO: 837 - DNA, 201 bp, Homo sapiens
  variation 101: note = n = C or T
  source 1..201: mol_type = genomic DNA
gcctgactatcaaacagaggctccagtggaagctgaagcttccaattgcactatatacctgatagcctaatctgaaatgagaatctcgggggaggtgtagncattctcaaaaaggctgctattttttttttaaacagaaaatataataaaactttacttatcctctctgccttcagaagtttaacaaaagtgcattctttc

SEQ ID NO: 838 - DNA, 201 bp, Homo sapiens
  variation 101: note = n = A or G
  source 1..201: mol_type = genomic DNA
tcagccaacttggaggatggccttccaccctctcaatttttactgagcatccactacctgctgcacagtgtgctaggccataaaagatggtcgaaaccaangtctggtgttaaaaacacaggaataggaggatagtggttctaaaatagccagatggtttttgaggaagcatagcctattggaaaggatatcggacagaag

SEQ ID NO: 839 - DNA, 201 bp, Homo sapiens
  variation 101: note = n = G or A
  source 1..201: mol_type = genomic DNA
atgatattatgtcattgtcatccttgccaagctcatgtattttcttcattggtaagaaggttaaaaatgtaacattctattggaagaagcacaaaaatganatgtggggagcttatttagtgattcatcccccctcccacttttttctttgctggaatcctatgacttctgaacaatgccattgctaagcaacagatcaga

SEQ ID NO: 840 - DNA, 201 bp, Homo sapiens
  variation 101: note = n = T or C
  source 1..201: mol_type = genomic DNA
taacattctattggaagaagcacaaaaatgagatgtggggagcttatttagtgattcatcccccctcccacttttttctttgctggaatcctatgacttcngaacaatgccattgctaagcaacagatcagacacttccttgcaagatgcaggtgaatcagaaggtataatgtgagcttagtcagaaccctcatggatgca

SEQ ID NO: 841 - DNA, 201 bp, Homo sapiens
  variation 101: note = n = C or T
  source 1..201: mol_type = genomic DNA
ttgggataaagggtacaatttacaaacatagaagtttgtaattgtcccagattaccaagttttttaagactttctgggtagacttccccaaactttcctantttcataagccaagccacataggattagacccatcatttttcagctatatgctagccatgattttctcaagtggatgatcagaagaacggagaggtgagg

SEQ ID NO: 842 - DNA, 201 bp, Homo sapiens
  variation 101: note = n = A or G
  source 1..201: mol_type = genomic DNA
tcttctaagttaaaatcctagcactttgggaggccaaggtgggcagatcacttgaagtcaggagttctaagtgaaaatcaacctggtattgatctatgaangttttcagaaaactcagaaggccaccagggattcatccatgccagtgatgctgtgtataaagccaggtacacaacatgtgtgagaccccacctctctctt

SEQ ID NO: 843 - DNA, 201 bp, Homo sapiens
  variation 101: note = n = G or C
  source 1..201: mol_type = genomic DNA
cttccctgattcccccagtcttcttatttcaaactcggtaacactgcatgcctcatgggtttgttgtgcaataaatgtgaaatcacatgacctctgggagnctgttaccaggccaagtccatagcaggcactccacgaacaatgggttgctctccctgaccacaaggaggatgtgattccatgtgttccctgcttctcccc

SEQ ID NO: 844 - DNA, 201 bp, Homo sapiens
  variation 101: note = n = A or G
  source 1..201: mol_type = genomic DNA
gagcattatacagaaactatgaattttcaaaatctatgagtgcttacaaggtattgtggggatacgtgagtgagtgtcatgattatgcagggcaggttatncagcaacacttcagggaggatttaagcattgaaataagctttacagaaggagagaaacttgatttgacaggaagaattaggatcagaaaaccaccaaatg

SEQ ID NO: 845 - DNA, 201 bp, Homo sapiens
  variation 101: note = n = C or T
  source 1..201: mol_type = genomic DNA
aatttcctaaattggtcttattagtaatagctttaatgtgatgctgggaatacacttcctattaaaaaccatttgctatattggctgttttgacttgtggnttatcttaaaatgagttgacctcactgatatcttacaaaacacttcagtgttacagaattagctctcaactctaacctgagtacacaactttagtttcct

SEQ ID NO: 846 - DNA, 201 bp, Homo sapiens
  variation 101: note = n = C or T
  source 1..201: mol_type = genomic DNA
tgagtgttttgcttctttgaggctaatctctatcatttgattgtaataaatgaaaacaggcataattgatttttaaaaagacagtaacactgttacacttngctggtggactttcatgtgcattctgcaggcagatggtgttaaattagaaagaggattgggcttggttgcaactttgggatggcctcggctcttctactt

SEQ ID NO: 847 - DNA, 201 bp, Homo sapiens
  variation 101: note = n = T or C
  source 1..201: mol_type = genomic DNA
cagaacagctctcaaaaaaaaatcagaacaattatttgactttactgctttttcttctcaattccaatctgtgtgttacttttatttctttctttccattntatgttggtaaatataaagatgattgtgcaaaagtatttaaatatcgtctgattataccatttttcagaaagataaggttttcctcacatccactgcttt

SEQ ID NO: 848 - DNA, 201 bp, Homo sapiens
  variation 101: note = n = C or A
  source 1..201: mol_type = genomic DNA
atgtgtaatttgtatgagctccgaccaacactatccatatacatccaatatgccctagtaacaaaacgcatatcaaacaaacaaaatcccaatttaagacnctgaaccagatttagtaaaggtcactatttttttaaaaaagttaagtaaaatattaacatatataatttggtcatttaacaaaagacctaccaagtattt

SEQ ID NO: 849 - DNA, 201 bp, Homo sapiens
  variation 101: note = n = G or A
  source 1..201: mol_type = genomic DNA
tgtggaccttgcagtgtaacactgctataaaaattcaacaaacaatgcgaaattctaatagtaagtcagacattaatattattttccttcttgccacaacngcaatatcaaccaaacatgtccattctccttgttccatgtgttctcttgactttctcattcttttgttattcaatcaacaaatatatattgagatcttac

SEQ ID NO: 850 - DNA, 201 bp, Homo sapiens
  variation 101: note = n = A or G
  source 1..201: mol_type = genomic DNA
tccacgggtcctctgttgaattacaatgcacctgggttagaacaacacatgaagtcataaccaggaatagagagctcatggagaaggaaacaaaagacaangcagttgtgatagaaaagtaggaagggaaaactcagtctagagcacaggaattattttatttagaaagaatagataaggtcagtcaggcgtggtagctca

SEQ ID NO: 851 - DNA, 201 bp, Homo sapiens
  variation 101: note = n = G or A
  source 1..201: mol_type = genomic DNA
gtgcatttagtgatcacagcaatgaggcctctccccagaatggccatccataatccaacgatagtctcaggctgtgagccatctttaggaagaccaacccnactttaccccaattgctttctgacccaaagcccattaaactagactcctgatcaggtccatttgtgctttatgtctaattttaaaggagtgtgttctggg

SEQ ID NO: 852 - DNA, 201 bp, Homo sapiens
  variation 101: note = n = T or C
  source 1..201: mol_type = genomic DNA
ctcccctgattttttgtaccacaacttaatcctcatgcagatttactgtctggattcatgtgatttgtttgttccaaaaatatatcaagcataaccacttngaatcctgtgagaaatttgtaagcatataattgagtatttttgactacatagagagatagaaaatgaaaaagagagagtaagagaaaaaaggaatagtga

SEQ ID NO: 853 - DNA, 201 bp, Homo sapiens
  variation 101: note = n = A or G
  source 1..201: mol_type = genomic DNA
cattactgggcttatatttcagtaataataataattgtaaaagtaagcttttaatatgcacgattctggttatttccgggagatttgatcttgaaaggtgnaacatattaaaattagagggctctaccctaagccccttcaatgtgttgcagaagtcctttaatgttggattagaagagatatccaatattagtgaatata

SEQ ID NO: 854 - DNA, 201 bp, Homo sapiens
  variation 101: note = n = T or C
  source 1..201: mol_type = genomic DNA
catgaaattgaaggagaatattcacttgcctaaacagttgaaactctttaaggactccaagtattcaattgccatgagggagctagagaaaaaaaaaatanatgtgtgtgtgtgtgtgtgtgtgtgtgtgtgtgtataaaatgtgtgtatgtgtgtatacatgtatacactattcttagaattgtgggtacatgtgtaaac

SEQ ID NO: 855 - DNA, 201 bp, Homo sapiens
  variation 101: note = n = C or T
  source 1..201: mol_type = genomic DNA
catgccagagactgtgaatactccctctactccagtaatgagattcttattgccaactggccaatgaatagtttatctcaaaaatcccatttttagagacngcttccctttcctgacaccatcggtcattagcctagttctgcagaagactgagtttgaagattattagggaatgctttaatgaaccatacctttaagagg

SEQ ID NO: 856 - DNA, 201 bp, Homo sapiens
  variation 101: note = n = T or C
  source 1..201: mol_type = genomic DNA
gtcaatgtataatggtcaatggtctgggctccagttgaaggagagacaattaaaagcaaaaataaaaagaagatggctgaagacagtttaaaaagtaccanaatatgatggcaacaaggatactatattaagaatcaagagatggggatttgaataattaaaccataatttattttctgtgacaaaaaaaaaaaaaaattg

SEQ ID NO: 857 - DNA, 201 bp, Homo sapiens
  variation 101: note = n = A or T
  source 1..201: mol_type = genomic DNA
gctttgctaaaaaagataactagatatattgcatattcctttatctgggaaattctaaagttgttaaaatggattcttaaatgccttaaacgtaagaaaanagaatgtgtaaaaacttaactcaaaaatatcaattttaaattatcaattgaatacatgaaaaataacggaagagacacttctgtgcttaattctgctgaa

SEQ ID NO: 858 - DNA, 201 bp, Homo sapiens
  variation 101: note = n = G or A
  source 1..201: mol_type = genomic DNA
ctaatgcgtttgtatatgtgaagcacttggcacaatatctagcgtaaagttaatgccaaataaacgttacgttgctatcacctttcttattagcattaacncaatatccagattaatattaatatgaatattagcaatatcaattcaatatttatataacagaactctccatgtattttctaaaaccagatactcaaatat

SEQ ID NO: 859 - DNA, 201 bp, Homo sapiens
  variation 101: note = n = T or C
  source 1..201: mol_type = genomic DNA
ttgggttctttttgattcaccagcatcaaggattccaggacacagcagtcacctgagagctatggctgataaatgtcttcattgcctcagagaattgttcnggggccgtgacgctctccagcattgcctgaattccaaacggaactacatgcctttgtgactttgaagattaatctctgtcactcacagctcgttggcttc

SEQ ID NO: 860 - DNA, 201 bp, Homo sapiens
  variation 101: note = n = C or T
  source 1..201: mol_type = genomic DNA
tatggaaaggaaaggaatcactaggtctacaaatgagatatggaggaagttgggggtaagcctatgcacaggtagagacactaaaatacaaaaaagtacanacctgccattcacttttattttgatgtttcaattgctctaaattttctaaatttatcatatgttcacaatatggacattgggttagaatctttttttttt

SEQ ID NO: 861 - DNA, 201 bp, Homo sapiens
  variation 101: note = n = C or T
  source 1..201: mol_type = genomic DNA
cagtgatgtgggatttagaaagcccctttcttttctgaaagtaaaacagacacagaggtatccagaggagacaaaaaagaatcagagatctctgactttanggcctgtcccatatttttgttttctaattctaataacctctcttcttgttgaatgatgcttggtaattcctatcttccaagatgctttttagaagagctg

SEQ ID NO: 862 - DNA, 201 bp, Homo sapiens
  variation 101: note = n = A or G
  source 1..201: mol_type = genomic DNA
taaagctcattttggcaaacacaagctgcacagcacaggaaagggaaggatggttctaagtccccttaagggtatggaatgaggaatggagactctggagntgaaggaatggcatggactacagccaatggaataatgccatctttagaatcttgactttgggattgcaggtcatctaagaaagcaacagtactgagtgtt

SEQ ID NO: 863 - DNA, 201 bp, Homo sapiens
  variation 101: note = n = A or C
  source 1..201: mol_type = genomic DNA
attgcctagggctaccattaagaaaacaatttaagtagcttatgccagagggcctgaactctgtcttttctctctctatttgacttgcataactcaaaccnaatgggcacacatcatcattctttacttctaccaacaactgattgactaatacttcattcattcagtaactattaatatttgtcaaagaccttccagact

SEQ ID NO: 864 - DNA, 201 bp, Homo sapiens
  variation 101: note = n = C or T
  source 1..201: mol_type = genomic DNA
gctggagggtggagggctgagagtgcctagcagcaatgcaggtaagacactggcagcagctgagatggagaaaactcaggcatgaggaaacttcaggaggnaaacctcaagttacccagctcagtgagaggaaccatcatagactttgttttctaagccagcagcctgagatttccccttgtggccaatacaacacccact

SEQ ID NO: 865 - DNA, 201 bp, Homo sapiens
  variation 101: note = n = C or G
  source 1..201: mol_type = genomic DNA
ctctctgctacattttcttttcatttcaagagtagagaaaattgcacataaagatgagatttttggttcaaatccatttgtttctttccagaaaattgcantcttctcttttaagaaaatacatctatgtctagcaaaacataaggtcggatttgcaatgcctctttgtgtctgaaatccggactcttccagtttggagca

SEQ ID NO: 866 - DNA, 201 bp, Homo sapiens
  variation 101: note = n = C or A
  source 1..201: mol_type = genomic DNA
agttaatgatgtttattttctgtggtttgtcaacccttggagctattgctactgcccagccttcttaccatgatctctaatcttcttgtgggtgtctttcnaaaaagggagggagggagaaagagagggaggtagaaaaaggaagaaagagagaaagagaggaagaaacgaaagaatttcctgagagcagacagatttctg

SEQ ID NO: 867 - DNA, 201 bp, Homo sapiens
  variation 101: note = n = C or T
  source 1..201: mol_type = genomic DNA
ccaggaaagttcagtggttagcaccaagaccccagtcccttagaggaataggctgttggtagcaaagattgaaccctagtgggtggaagctgggaatctanggacgaggtggaagcattattccagaagaaacaagacagggttatgagtcctgaatcataggatcagcactgatcctaggcagcttgaactgatgttaag

SEQ ID NO: 868 - DNA, 201 bp, Homo sapiens
  variation 101: note = n = A or G
  source 1..201: mol_type = genomic DNA
gacaaatacctataaattctctgaaccctgttcaggtgttaacctcttctttgacaccttctctgacaactgaacccctctggagttacttagcacacacntgacatccacgagtccacgtttacctagacagcaagattgtgagctccttgaggtcaggagactcagaggcttctccacatatcccagggcccagaacct

SEQ ID NO: 869 - DNA, 201 bp, Homo sapiens
  variation 101: note = n = T or C
  source 1..201: mol_type = genomic DNA
caacagtgttggcatgatacccaacttatattagcttcaaattgtttctgaagcacatagctgagagtaaacattagattcccattccatatttcattcangggacaaaggagctaaccacggacacttaatggatcatgctggcagagatgtgagtggaaatgcaacaaaagtattgaatgtccattgaacatagaaaat

SEQ ID NO: 870 - DNA, 201 bp, Homo sapiens
  variation 101: note = n = T or C
  source 1..201: mol_type = genomic DNA
gagaaacactactgttgtcagcaagtgaccagtttgtgtggtgagatgataattaaataatatttctgtttctctgttggtatattgaagtatttgagaangtgtgacatgtgatatgttcatggaaattcagacaaattacaattacttcaatacaagtttgataaagccatctgaaaaacaaatctgaagattaaatga

SEQ ID NO: 871 - DNA, 201 bp, Homo sapiens
  variation 101: note = n = T or C
  source 1..201: mol_type = genomic DNA
cctaaaatgaaatctgattttatgcctgcaatcctcttctacacgccgatccctgaaagccagtgacttttccccaagcatcttactgttagctgtaatancatcattttaaggccacataattctagacaatactcaaacacttataaatttggggttacactagcatattaccacccagtctgggggcacagagggaag

SEQ ID NO: 872 - DNA, 201 bp, Homo sapiens
  variation 101: note = n = T or C
  source 1..201: mol_type = genomic DNA
atttggtgggtgctgtgaatgataatagaaaacatggagaagttggatgtaagcaaaagacgtaattttaatgaacaaaagacattgaattataatgaaantggaaagactggttaatttcgtggaaaactaatgcaatcttttaacatattcttgcattgcatatgtgaagttcataaagatatgtgatgtttccaatta

SEQ ID NO: 873 - DNA, 201 bp, Homo sapiens
  variation 101: note = n = A or G
  source 1..201: mol_type = genomic DNA
agctatttaagctgaaggagctgtttaaacttctgttttctgattttctttatttctgatatttgaacttcatttcagttaaatcttactaatctgcaccntgcattattcttatctgtaggtttcaaacaaaacaataaaggggtaaaagaaaaaaatgatggtcagtaaaagattgtgtattatattcaaatatcaact

SEQ ID NO: 874 - DNA, 201 bp, Homo sapiens
  variation 101: note = n = C or T
  source 1..201: mol_type = genomic DNA
tatcacacaaagtgagtctctttttatttactttaactcaatgagccaccttaatctataactcattctttctctcaggaatatcttcttatatgtatcantgattattgatttagtctcctatagggacactaattatccacatgttattgactctcctttccctgttctccatgtcaattatctttcctgtcatcggtt

SEQ ID NO: 875 - DNA, 201 bp, Homo sapiens
  variation 101: note = n = C or T
  source 1..201: mol_type = genomic DNA
ttttctgctgccatcctttgtgaaacggcaaactaaatatgaaaaactgctgataaggaggaatagacttatgcccagaggataaacttaacagagctcanctagcctggctggcattgacccctgcctctacatttttagtacatgtctcataaaagagaaactgcctgtgcttctaggattcttttatataagtgccag

SEQ ID NO: 876 - DNA, 201 bp, Homo sapiens
  variation 101: note = n = A or C
  source 1..201: mol_type = genomic DNA
agatggattaagatgggcaccagcagccatgccaccctgagagtaattaaatgtaacacagcaagtataaaaattatcctggttgcttcaagtctctgagntttgattcaggccttgaacttgccctgtaccaatgattaactaactaatcatctggatattgtgccacaagatgtcctttcagcctgatgcctagttcat

SEQ ID NO: 877 - DNA, 201 bp, Homo sapiens
  variation 101: note = n = C or T
  source 1..201: mol_type = genomic DNA
attaccagttctttccaataagaaaggttttacttttttttctttgccttgtcaaaattatttcttcatgatgatgcacttgcaaattagaaaagtttttncctccagtttatactaaaccaaaattcttaccatatttgtgaaggacaactttttaaaactttcaattttgtcataattttaaattcacagaacatgaaa

SEQ ID NO: 878 - DNA, 201 bp, Homo sapiens
  variation 101: note = n = T or A
  source 1..201: mol_type = genomic DNA
gaactttcactctcactcaattattaatcttcttgcatcccttaacatcacaaacttctgacacctacactattccttaccttttatctattttgcacatnattgagtaataaaacaagataaaaattcaatggttttttggatttcaacttttttaatttttaaaattttatttcaatagatttttggggaacaggtgat

SEQ ID NO: 879 - DNA, 201 bp, Homo sapiens
  variation 101: note = n = T or G
  source 1..201: mol_type = genomic DNA
acctgtcacattgttagcgacataacagcagaatatctcatggaattagtcattgtgagtcctctgccatatagctcagtggagtgcaaacctagtgtatngtgtccttaggctgaatcagaaaaggttccattgtacatgtaaataaatgtctagactttcttgacgattagttctgttcttagtactcaaattttcttt

SEQ ID NO: 880 - DNA, 201 bp, Homo sapiens
  variation 101: note = n = A or C
  source 1..201: mol_type = genomic DNA
atgatggagtcttactttaaaatgaagtttccactgaaagaaattatcaatactattctgaattatccttgaaagaagttaatcccaggcaggaaaaaacnaaaagaagtaactgtaggaacacatattttccttcttctctattgcctgaagaattaagcctggaatctgtaaaatgaataaactttaaatggttctggg

SEQ ID NO: 881 - DNA, 201 bp, Homo sapiens
  variation 101: note = n = G or A
  source 1..201: mol_type = genomic DNA
aacgatgtgcgtttctccaccactcaggctttgacagctggtatctacttcactctagcaagctgaggtctctcctcctgattaggtcagctcccttgatnatcataattcttagtgtcacaacaacacagaaacaacaataaagcaatgataacaacaaagtattctgagcattgacatacctttcatctctgcaagttg

SEQ ID NO: 882 - DNA, 201 bp, Homo sapiens
  variation 101: note = n = C or A
  source 1..201: mol_type = genomic DNA
aacttgataggtttcaatttaatgtgctatcaaatgtcaccaacgaatttcccatctgaaatatgtaatgtaaacatgtattcagccatgtttctctaagntttgttcttctcattctaatatgagaaattatttaacttgtgttatctctgccttttagaaatatgtgcaaattttgtggcaatatatctgatgatataa

SEQ ID NO: 883 - DNA, 201 bp, Homo sapiens
  variation 101: note = n = G or A
  source 1..201: mol_type = genomic DNA
gcacatctttttgacaatttggaggctaaaaagcaaatcgccctgaaattaaaatatatataacccccaaataatgaactatctctttttgagtaactacnttgatcaaagaaccaagtagataatatcgtataatgtttctaatcaagccaaagtcacctgtatttctctcatttcccaaaaatgtcagctgttatccac

SEQ ID NO: 884 - DNA, 201 bp, Homo sapiens
  variation 101: note = n = T or C
  source 1..201: mol_type = genomic DNA
gaatttacgtttctaaagtttctaggtgatgatgatggtctagtctacagtttgaaaaccactacttagatcattcatacaagctaaattaggatactttncagtaaggagtaattagcaaggtgtggagaaagaaatgggcacatagctccaaaagcagtagacatttgcctagaaagcacattgcctaaggactatcaa

SEQ ID NO: 885 - DNA, 201 bp, Homo sapiens
  variation 101: note = n = C or T
  source 1..201: mol_type = genomic DNA
atcaaaatatagaacatttccatcatcccaaaaaggtctattataccactcatagtcaaaacacccaatatttctcatcccaaacaatgactgatctgctntgtgtaaatctatatgtacatagtatgtactctgttgtgtatgatttctgttacttagtataatgtctgtggacctggcatgatggctcacttctgtaat

SEQ ID NO: 886 - DNA, 201 bp, Homo sapiens
  variation 101: note = n = T or C
  source 1..201: mol_type = genomic DNA
ataagatgccagaggttttttcctctaacatgcttcctccttgaaaccctttattcaagatatcagctatcaaatgacagcattaatttcattttgaaagnttgcctttattgagtgaatagcaaatttcaagctctgggtcatgacttccaaatgctatcaagaaagagggcaaaaaaaattgtgaagtgaaagcaaaat

SEQ ID NO: 887 - DNA, 201 bp, Homo sapiens
  variation 101: note = n = G or A
  source 1..201: mol_type = genomic DNA
tcgatcagagtcttcagctctccactcaggagggaagaccaaagtgagactgtttttagaatttcctgggaaggcttgcagaggcaggtatcaaatggcantcaaccactggccactgggggacaagagcacagaaaacctgcagaaactgcatcatcttaaacatgtgaaatcagatattagttggggtcctgtaacttt

SEQ ID NO: 888 - DNA, 201 bp, Homo sapiens
  variation 101: note = n = G or A
  source 1..201: mol_type = genomic DNA
cgtacactcatacaagtgacaacaagttgactagaattgctggaaagttttggttggtcttgatgcattgtatagctttctgcccttatactgagttcccnttttcttctccctgcccacctttgcccaccatagcctaactcctaaattgctttaggagctacaaattccttcttttgttttacagttttctcctttcct

SEQ ID NO: 889 - DNA, 201 bp, Homo sapiens
  variation 101: note = n = C or T
  source 1..201: mol_type = genomic DNA
gggtattgtcctaccttcttaaattactaataattctgctactgaagatttgacttttcttccacatttttctcacatgacaatgtttctgaaaccctatngattttctccttcttaaaatgaaaataataaaatgttggatatggaagtattttgaaaatatttttaattttataaggaaaggaagcaaggcatgagttg

SEQ ID NO: 890 - DNA, 201 bp, Homo sapiens
  variation 101: note = n = T or A
  source 1..201: mol_type = genomic DNA
ttcattgatctaagatcaaagaatagagaaaataaagaacaaattagggaatgtggaaagaggttttagtgtgggcaaatagttgagggaggggactccanatgagtattcacaagctggataaggacagctggcttgatttcttgatttgacactcatccaatacaattccccccgctttcaatctgcctttctctctca

SEQ ID NO: 891 - DNA, 201 bp, Homo sapiens
  variation 101: note = n = A or G
  source 1..201: mol_type = genomic DNA
taaaaggctaaaaatcataagataaaactgcccctcaacttctaacaggactcaggccttggggctcctcatcagtttccctgcttttccagggaccaacntcgcttttgtacatccaaagcaaacaaaaatgtaaatgttttaatcccatttgaacaagaaaatagctctctatatatagaaaagatttatcatatgaat

SEQ ID NO: 892 - DNA, 201 bp, Homo sapiens
  variation 101: note = n = G or A
  source 1..201: mol_type = genomic DNA
cttcctcttcctccccttccttcctttcctcttttaattcctcctccccttccttttcttcctttttcttcttctttctcttttcatctaattgccacagnttagatgaaactttgcccccttttggaaaccttccttatgttcccaaaatggttaggtgaacctgcctttcttctttcatatcacattgaccatagggct

SEQ ID NO: 893 - DNA, 201 bp, Homo sapiens
  variation 101: note = n = A or G
  source 1..201: mol_type = genomic DNA
cccttttcatcaggggtacatgctaataagtgcaggcaaactgtctaaatatttgcaacaaaccctgggagcaactacatttttagcaagtatgaattccncaacatccagtgaaaggatgctgtctcaatgaactatactcaaaaagctaagagacttttcattttattttaaacacaagactagtaattttactttatt

SEQ ID NO: 894 - DNA, 201 bp, Homo sapiens
  variation 101: note = n = G or A
  source 1..201: mol_type = genomic DNA
atcattcacatcttacagatggagaaactgaggctcagggagtttttgtggcctgttcaaggtcctgtaggtactaactatcttagcactgcttctcgatnccacgggaggaatttcgagctggtcctggagtctgcccagcagcatgatctcccttggcctggaaacattttggggcctgcaggacctcaccaagcaatc

SEQ ID NO: 895 - DNA, 201 bp, Homo sapiens
  variation 101: note = n = T or C
  source 1..201: mol_type = genomic DNA
tgagataattatctaggatggcaatccagatcatgcaatactttcgattagaatatgcagatgatatgcaaataattgaggtcaaaattttatttaacacngggcaaaatagaatgaaaatcaatccattgaattttgttcacacagaggtgggacatttattttcatgacctaaaatgtaccaatactttatgttacata

SEQ ID NO: 896 - DNA, 201 bp, Homo sapiens
  variation 101: note = n = A or G
  source 1..201: mol_type = genomic DNA
tttttaggtataacacatgttaaacgagcttttggtatcaggtgaggaatctaccttaactgctaacatgcaaagataagatccacactaaatacaagtcnatagtgtggaccttataaatggggcgcccctttgtggaaatgagaaagttattttggctttattccctcattttctcaaaaagttaaatcaagacccctg

SEQ ID NO: 897 - DNA, 201 bp, Homo sapiens
  variation 101: note = n = A or G
  source 1..201: mol_type = genomic DNA
aacaaacaaaaacaagaagtactgcattgaaggcaggggcccaagttacctaggtctaagggtggtaatgttataatcacacaaaggtgcagtatgcaatngaagctttaaacctaggtatcgcattcactgaaaacgttttcagctaaagtgtctccttcaattagtgctgttcaaaataaaataattgggaaagtacat

SEQ ID NO: 898 - DNA, 201 bp, Homo sapiens
  variation 101: note = n = C or T
  source 1..201: mol_type = genomic DNA
tcatgaaatccaaagccatcaaaaatagactgtagattcatgccaggattagatttgtttatgtaaatccaaaatatttagtgtcaagtggtactaaatangcaggttcattgagaaaagtgtgacaaatacttggattttagtaatttcatttgtatgtatgtgtatatgtgttttagttttaaaatatgattctgccca

SEQ ID NO: 899 - DNA, 201 bp, Homo sapiens
  variation 101: note = n = C or A
  source 1..201: mol_type = genomic DNA
aggctggcatgattcccagcacaacccacctgtaccttgtttggcaacagagattcaagattttacgtgtccactgggccaatgcatggcatcccttcacngttcttctggtattcatcactagaggttttcctttattaataaaagctaacctatacccttgctaagcaaagtgtggtctagggaccagcagcaagacat

SEQ ID NO: 900 - DNA, 201 bp, Homo sapiens
  variation 101: note = n = G or A
  source 1..201: mol_type = genomic DNA
acttctggatcttaggaaggaagtctgcatcgatagcaagactttgtcttttgttctttaaaaattataataccccactgtcatctaccaaatgaagatanccattatttatttaaatttgcaatgctttctctccccagttgctttggagtagaagcatcttactgtccttggttcattgcttttcccattttgtttttc

SEQ ID NO: 901 - DNA, 201 bp, Homo sapiens
  variation 101: note = n = C or T
  source 1..201: mol_type = genomic DNA
tcatgatctgtagtccatagaagggagcaagaaactatatggattttctgccaaagacacaattgttctatttactaataaaaggggaaacatatttttancctgcagtccttatgtagtcatgataccagataatcagctccagagataacttcaaaaaagagcagctggacaaatttcaggagatattttatctgtacc

SEQ ID NO: 902 - DNA, 201 bp, Homo sapiens
  variation 101: note = n = G or A
  source 1..201: mol_type = genomic DNA
tgtatgtttcaaacattatataccatttatttataatattcacgtagatacgtatatgtctaatgtaaatgcatgtaatctatgttagtaatatttccgcntcttaggatcatattgcatcattacttttaaaaatggttgtatgatttacactccctttgttggtctataaatatatccatttctctctagaacagtggt

SEQ ID NO: 903 - DNA, 201 bp, Homo sapiens
  variation 101: note = n = C or A
  source 1..201: mol_type = genomic DNA
gatgtaactattttatgatattatttctaaaatgttgagttaggctttgaaatttggccaagagagggcaaaaaagaaattgaaaaattaagagtggaaanaacttctgatggcattaatacttaataaagatttcattttgatcaatagtttaggccattggaaaataactgataactttttattccctccccttagtaa

SEQ ID NO: 904 - DNA, 201 bp, Homo sapiens
  variation 101: note = n = G or T
  source 1..201: mol_type = genomic DNA
ttgcaggagatagaagttacagctgccaatcctagggaaaaagtaatacatcctatccagtatgctgggacatcctactgtagcacagcaagctttggctntggaaacttctcctgtccatatggtgtttccatgtttctacttgcttctctcgacttagttttcgtgatttatgacaaaggtgacaattacagcaatgat

SEQ ID NO: 905 - DNA, 201 bp, Homo sapiens
  variation 101: note = n = C or T
  source 1..201: mol_type = genomic DNA
atgttacttaccttcctgcagtggaaaagctctcattaggacaagcacaggtttttatggatgtgtttttatcactaactggctgtgagtctcctcaaagncaatgcttctctgcaggcccttgctacccagcttgttcacctttaagctggggtgagggagggtgggtataaggacaagatgatataaaagaaatataaa

SEQ ID NO: 906 - DNA, 201 bp, Homo sapiens
  variation 101: note = n = A or C
  source 1..201: mol_type = genomic DNA
ctggcaaaagttaggctacattggaaagtaagtttgaaagattcgattcaggagtgtactttgtccttagaatacatttcaaagctataaggtttgccacngtccatttcaaagatttacttaaacccttcaaactcctgtcaatataataacaaagaatgaatgaataaagagttaaacaagtgagctaaaatccttttg

SEQ ID NO: 907 - DNA, 201 bp, Homo sapiens
  variation 101: note = n = G or T
  source 1..201: mol_type = genomic DNA
tgaaagaatgctgaatatttgtgaaagtaattaaaagtatgtgttatttctctgaacagatcaccagcactgatgaaactggtgtattataaaatttctgntgtattacatagctaatgaataaggagggaatagctttatggcagcaatgttcaagctgattatcttagggtcagtgcttcagtggatttcaagagatat

SEQ ID NO: 908 - DNA, 201 bp, Homo sapiens
  variation 101: note = n = C or A
  source 1..201: mol_type = genomic DNA
cctgcacgttgtgcacgtgtaccctaaaacttaaagtattatttaaaaaaaaaaacagaaaacaaatatgtaaaatgccaaaaaaaaaaaaaaaaaaaaanaaaacaaaagtgactattgggccattgggcgcctaagaaatcctcttcggtgtctgtccttgtcccttatccctactgcagctgagtgcttcctgctttg

SEQ ID NO: 909 - DNA, 201 bp, Homo sapiens
  variation 101: note = n = A or G
  source 1..201: mol_type = genomic DNA
attaaaattaaagcagcctataagtgtagaacagtggggattaggaatattgaggtttcattggtcaagtttttcagtgtcataaggaaagctgactacantctctaagagggagagaaactgagtcaaatagattgtcaagtggaatttgtagacagcacagttctgggcaatcccatgaaaaagcaggtcattcaccta

SEQ ID NO: 910 - DNA, 201 bp, Homo sapiens
  variation 101: note = n = G or A
  source 1..201: mol_type = genomic DNA
cttcatttaataaaatctacaaagactcttttcctcagaaggtaaaatttacaggattcagtcattagaacctgctatattttgatagctattattcagcnttcaaaagtatagaactatccctgagaaacaatggttcagtcaattatacttccctaaccgctttacctctggatgtaataatgtgatgttattgtcaat

SEQ ID NO: 911 - DNA, 201 bp, Homo sapiens
  variation 101: note = n = A or G
  source 1..201: mol_type = genomic DNA
agcaataccccagcactgctaccagcttggtcaattttagcgtaaagatattccacaggcaggggggaaatgctgctggagaaagcaggagcccacaaganggatagttcatgtgtgtgaataaataaagcactgctggagtttttgacattttggagaggaattcattatggttcataggtacaaatgtaatgaccttca

SEQ ID NO: 912 - DNA, 201 bp, Homo sapiens
  variation 101: note = n = C or T
  source 1..201: mol_type = genomic DNA
gcctggagccaagtcacaggctcctttaccaccacccacccatccaccccctcaggcacacagacttactatgaataatcatttgccagcttctagaattntttttttttcctctggatcatgactttgcattttagaagtaagaaattatggaaattcaagttatagagtttatgaatataaaataacaagtaaaacaaa

SEQ ID NO: 913 - DNA, 201 bp, Homo sapiens
  variation 101: note = n = A or G
  source 1..201: mol_type = genomic DNA
ttggcatgaaattgaagagaagtcctcatcatctctcttttttactcttgaccacaccattcagattgtatttgaaagagcctcttttcttcaaatgccantgctttaatttgcaatcctgagattaattgctttcatactgaattttcttcatctcatcttgtttagtgattggattattgatctatataaactttgtct

SEQ ID NO: 914 - DNA, 201 bp, Homo sapiens
  variation 101: note = n = G or A
  source 1..201: mol_type = genomic DNA
atttcagggactatgagtcagtgcttagaactgacttgtgatttcatcaactttctttaggctggaaaatgcacaggcttgtgtctgtctctgttgcccangaaagcattcctagtgtttgatgcaggcatcaagactgtgtcttacctggatccataatccttcagctcagttgtttctaacactcccgggaatctttca

SEQ ID NO: 915 - DNA, 201 bp, Homo sapiens
  variation 101: note = n = T or C
  source 1..201: mol_type = genomic DNA
gaaaacaaattccacagttctttccgtgagtttgcaaaagtctacacatggagagtgagtaatgagttttctactatctgttagcaatggtgagcctgggnactgagtgacagacagtctatctcactttgaaatcaactttatgcgtttaaagtttcatgtttagagttaatctgtggacaaacatctatgagaactttt

SEQ ID NO: 916 - DNA, 201 bp, Homo sapiens
  variation 101: note = n = A or G
  source 1..201: mol_type = genomic DNA
ctcttaaggaagtcaacacaaaataagcctagttgagagataaagagagattctgatgatattttggaggcaactgtactagccacatgagaaaatgtttnacttctggatgtttcaattagtcatcccctcgattttttgtgctttcacacacacacacacacacacacacacacacacacacacacgtaagaggcccag

SEQ ID NO: 917 - DNA, 201 bp, Homo sapiens
  variation 101: note = n = G or A
  source 1..201: mol_type = genomic DNA
taagaaccatgagagcttaggatgggaaggggctcctcctctctacctttcctcccagcgagtgctcaggacatcttcccgctcaccccgtttcttaaatntcctccctgactttttcctccagtccctgtctctaaactttccaactatttatttcctctgatgttgtctgaagctccaggataattgttgcaggagaag

SEQ ID NO: 918 - DNA, 201 bp, Homo sapiens
  variation 101: note = n = G or A
  source 1..201: mol_type = genomic DNA
gaatttcccacagcctggatttcacccagtgcagttccatatgccctctgtaattcctgcaaatgactctttttaatggtcacaccgtgatttgtaaccantgccttacaattgcccagcttacagttctgaatcgctagaatagttaccactaagatgaacatccttgtgtatattttttgtatgtttgtggacgccttg

SEQ ID NO: 919 - DNA, 201 bp, Homo sapiens
  variation 101: note = n = C or T
  source 1..201: mol_type = genomic DNA
accttataagtaagaactatttacaaaatgaagcaattccacactttacaaaaagatttgccaaagccttccttgaaatgctgcactctctaggggcctanaaaaatgattttgatttataaacacatttcttttatgctctgtgaaagttgattatatgaattgggccattctagtcatacccaactaaatcagagtcaa

SEQ ID NO: 920 - DNA, 201 bp, Homo sapiens
  variation 101: note = n = G or A
  source 1..201: mol_type = genomic DNA
atccccatgaggtaggcagggtgcttccaggtgaggcaagtgaggctcagtgagaggaagagactgttctctccagcgcatcactggcagtcagataagancccaggactccaaggcacacaaaacaggtaggtgcttaatgctggaaagcttggtgaccccttggccacttgtgaggtctatttttgaagctgctgaagg

SEQ ID NO: 921 - DNA, 201 bp, Homo sapiens
  variation 101: note = n = A or C
  source 1..201: mol_type = genomic DNA
aagactcagtgaggtaaccgactgtcccagagtcccacagccagctggtggcagaactgtctcaaacccaagtgcctcagagcccagacaccctggggcanctgcctccccacccctctccctcccactcactcctgccctctgctctccagtcatagtatccacctctcagccaagaaggtgtcaagggctcctctgcca

SEQ ID NO: 922 - DNA, 201 bp, Homo sapiens
  variation 101: note = n = T or G
  source 1..201: mol_type = genomic DNA
acatcagcagcaagaagcctaatggcagtgtctaatgcttggcatcagcagagttggtcatgagtgactgcatccacaaccagttggacagccatgtgacncaactgaactagctttgcagcacaattttgggtgttgcctctgaatgcatactctctaggccctcctagaggctcttcatgctttctaatacctcttcta

SEQ ID NO: 923 - DNA, 201 bp, Homo sapiens
  variation 101: note = n = A or T
  source 1..201: mol_type = genomic DNA
gatcaaacccaaatgcctttcctttgagattctcttccttcctctgctgaaaaagcattactggttccatctctggctttgggatgggaggacagtgtggnctattatttatagagggtctactatgagccaggctctgtactagatgcttgacatatgccatctcgtgcaagctgccccaaaatttatgaggcaggcatg

SEQ ID NO: 924 - DNA, 201 bp, Homo sapiens
  variation 101: note = n = A or T
  source 1..201: mol_type = genomic DNA
ggggtaatcaatggaaattaattttacaatgcatactttttactgttttatggaaaataaatgctattgatagtcttgttatgctgcctgtattgaattancttagcaaatacaaagtcgtgtttacatgtgcttttataacttgccttaagtatattctgtcagcaataaacaacttgggtgcacattctaaaatgaata

SEQ ID NO: 925 - DNA, 201 bp, Homo sapiens
  variation 101: note = n = T or C
  source 1..201: mol_type = genomic DNA
caaacatcaatggagtggtaagaatgaaagtccttttggaatgtgaagaagatagagtgggaagtaaagaagtaaagactgaaaggatacactgttcttangaattctgatggacttttccttttagaaatatgaacaaaaaagaataagtccaaattaaatattctttagaatattatacaataaaagtaacattattaa

SEQ ID NO: 926 - DNA, 201 bp, Homo sapiens
  variation 101: note = n = C or T
  source 1..201: mol_type = genomic DNA
tctaccacgttcacggtcttcagtttgcttcgaaattatgtttccacatgcttttgtacaagctgttgttaactcccttaaatacctttttctaatcccancttgtaggaaagttcaattccttcttcaaagcacaagcaacaacttcaaaagcgaagcctcccttgacttcttctcccacttcaaagtggcattaatgac

SEQ ID NO: 927 - DNA, 201 bp, Homo sapiens
  variation 101: note = n = G or A
  source 1..201: mol_type = genomic DNA
atcaatttagtaatggtgtttgtaaaataagacaataacccgaatctttatatagttcttgtaacttttcataacattttcacataggatgtcttggccanccacagcaacaataacatgaggctgatattctccccatttcatggatgataaaactaagccaatggttaactggattgttttgtaaatatttggccaccc

SEQ ID NO: 928 - DNA, 201 bp, Homo sapiens
  variation 101: note = n = G or A
  source 1..201: mol_type = genomic DNA
gtgaaaactcaaatgcagaccccctgtagatctgtgagaggtctgcgtagagctctctccatcctgtactctgtcttgagaactctagtttccttaggccnctcccaggctctgggcttatttgtttaactcagggaatttgatggcctctgcttggcttccgctttcatgtgatgcttctgggaaactctttgaggcagt

SEQ ID NO: 929 - DNA, 201 bp, Homo sapiens
  variation 101: note = n = T or G
  source 1..201: mol_type = genomic DNA
gacatttttgttgtccttaaatcaaattctgaattaagttattttgacctccactaactttgggatgtttcagagattccctagaatatctcaaaataatntgttcactctccttacaaaaaaagatatgttaaattaattaggcttatttggtattttaaattaaatgaaaaacattgtgtcactcagataataagtgac

SEQ ID NO: 930 - DNA, 201 bp, Homo sapiens
  variation 101: note = n = T or C
  source 1..201: mol_type = genomic DNA
tgttggaggaccatgctgagtgaagtataagaaatcatgagatggatgccgaaagcattctaaatcctagataataatgaagccaacatatcagcacttanttgcttatgtggaaaaaaaaaaaacaaaacttctctttattgaagctactgctgttttggtggagaacctcattgttgggtgtttgtaaggcttgtgtga

SEQ ID NO: 931 - DNA, 201 bp, Homo sapiens
  variation 101: note = n = C or A
  source 1..201: mol_type = genomic DNA
attttacttatagtatgctgtttgtgtaaattctgtactaaaactatagatgagaatactaacgtgtttgtcatgaaagtcttacaatcccagcccaactngcatgagtataatcagagagctagctgcaaagaatttctgctcttctcaccttgggatcaacttctatttccactctgccccctttcagcaggaagaaac

SEQ ID NO: 932 - DNA, 201 bp, Homo sapiens
  variation 101: note = n = A or G
  source 1..201: mol_type = genomic DNA
atttataaaagttttgggggccatggtagtgcagtagagtttttaaggttgtttgagcagaaacaagaaaacagcataatgcaaaaagacagattggttantatcagcttacttcaggtcactctctttataaaggttataacaggggggactttcttatgatactagctcaggtttactgggccctgtttggttgctgtg

SEQ ID NO: 933 - DNA, 201 bp, Homo sapiens
  variation 101: note = n = C or T
  source 1..201: mol_type = genomic DNA
attggagaaagaaaagcttctcatataaattaatttatagccttgatgcgcacacattaaactttgagcatgtgaatgtagaaagactaagatccattatngatgtcccttaggtaggcagcgggtaccacggcctagagcagaactagtaaaaataagtggaaaaaaggaagagacacaagagggtgtgtgtgtcagttt

SEQ ID NO: 934 - DNA, 201 bp, Homo sapiens
  variation 101: note = n = A or C
  source 1..201: mol_type = genomic DNA
ctttctgcgagacagaccaatagtgattcatgtaatacacttgtgctgaactattttggtgaaccaaggtagtgacaaagcttttcattatttgaaggagnaagggcagcaagcaggagagcaataaacaggttcctatcactattattacccctattataagagttttaaatcctcctaatgctgggaaccattttccaa

SEQ ID NO: 935 - DNA, 201 bp, Homo sapiens
  variation 101: note = n = C or A
  source 1..201: mol_type = genomic DNA
ttgactcattttgaacttgaataagaaaattgctcgtatttgctttttgtctaacatcatttccatagtctaaaataaaaaaaaaataaacagctagtaangtcattagcaaaaaaaaaaaaaacccataaagcaagaaatgtacgttaaaatgatgtataacataaccacatttatttaaaaatgtattccaacatcaaa

SEQ ID NO: 936 - DNA, 201 bp, Homo sapiens
  variation 101: note = n = T or C
  source 1..201: mol_type = genomic DNA
ctgtgggtttattctgaacatatccttctgctacttgtttgtttactttaatggcattatattcctgataattactcagattgaggcacagagatatcatntattaattttactgaaatataatattacttatacatatatatgtacaatttattatatgtaataactttattccagttaattactatattattcgtaaat

SEQ ID NO: 937 - DNA, 201 bp, Homo sapiens
  variation 101: note = n = A or G
  source 1..201: mol_type = genomic DNA
ttaacatggagtgcagatatttttatatggtggtaatttgaattcctttgggtgtaaacctatgcagggattgctggatcatacggtagttttatttttantttgtttagaaacttccatataattttctgccatagctgcaccaatctaccttctcagcaacagtgtacaagtgtttcctttcctccacactcttgtcaa

SEQ ID NO: 938 - DNA, 201 bp, Homo sapiens
  variation 101: note = n = G or C
  source 1..201: mol_type = genomic DNA
caaggttggaggtatggaaatttcagagattaggaaagggatatatagaagacaaaaaccacaaaagactgtgtttttttaaaaaaagataattaggaganagcattgtcatagaatgcaaataaagaaagtatatcaagaaggaggaattgatcaaaagtgccaaatgcttcatagagaaattgaattacacaaagataa

SEQ ID NO: 939 - DNA, 201 bp, Homo sapiens
  variation 101: note = n = A or G
  source 1..201: mol_type = genomic DNA
gaagtttttctttggttgctaatgagatgactaatgtctggtagcacctaggtaaccttaggatgggggctggtcactggaaagtccaaggcatgattagnaggttgcaactttcagctccacaccccaaacttagaggagggggaagggtggaaggttaagttgatcacaaatggccaatggtttaatcaaccatgccta

SEQ ID NO: 940 - DNA, 201 bp, Homo sapiens
  variation 101: note = n = T or C
  source 1..201: mol_type = genomic DNA
ttataaaaatcaattacccatttttaattgagttgtcttgttattattgagttgtgagaactcattatgttttctgtacatcagtctcttatcagatatgngagttgcaaatactttttcccattttgtcaattgtctttccacttttttgatggcatcatttgccgaacaaaagttttcaattttgatgaagttcaatct

SEQ ID NO: 941 - DNA, 201 bp, Homo sapiens
  variation 101: note = n = G or A
  source 1..201: mol_type = genomic DNA
tgttccctttgaggtcagaaacaaagcaaagatatttgtttttaccacttctattaactattgtcctccagtgcaataagagaaggaaaagaaataaaagncataaacattggaaggaaaaaagtcaaactgttttattaataatcatattgttttgtaaaataaaaaatcatgagaatctacatttttttttcttttgag

SEQ ID NO: 942 - DNA, 201 bp, Homo sapiens
  variation 101: note = n = G or T
  source 1..201: mol_type = genomic DNA
gaaagacataagcaaattaagttttaaaataatcatactagctcctatgaagttggccactgtggcctggagaggaagatggaatagataataaaagaganaattaatagtggtttgacttggatggttgtagtctaagggatgagaagtagtcagattctagatgtactctagagatatctagagccaatagcatttgat

SEQ ID NO: 943 - DNA, 201 bp, Homo sapiens
  variation 101: note = n = G or A
  source 1..201: mol_type = genomic DNA
gctgtttttcagatttcttctttgtctcttgctttcaacattttgaatgtgatgtgcctgggtgtggatctctatacatttatctaatttgcagtttgtcntactttttggatgtgtaaatctgatgaaaaacatcagatttgggaagctttcaatcactatttatttgcatatactttcccctttgtctcttttctctat

SEQ ID NO: 944 - DNA, 201 bp, Homo sapiens
  variation 101: note = n = G or T
  source 1..201: mol_type = genomic DNA
cctggtacctcccagatttcatgtcctcacatttcaaaacacaatcatgccttcccaacagttccccaacgacttaatttattccaacattaactcaaaanttcaatgccaaagtatcatctgagcaagcaagtctcttctgcctataagtctgtgaaatcaaaatctagttacttcctagatagaatgggggtacaggca

SEQ ID NO: 945 - DNA, 201 bp, Homo sapiens
  variation 101: note = n = G or C
  source 1..201: mol_type = genomic DNA
ttatcaaacataggaaacccttattaagtttgtatatgatctgtaggatttgggagaattttccacaaaccaccatcaggcttcctacatttctaatctgncttctcctccactacctcatatacccagtgtccaatatcataggacacactaacgttataactcctgctccgtggtctttctgtcatgctgctgcgtaac

SEQ ID NO: 946 - DNA, 201 bp, Homo sapiens
  variation 101: note = n = G or C
  source 1..201: mol_type = genomic DNA
tgtggcattgcagattattccattaagaaaatgaatctatctctctgccccttgattctgagttggccatttgatttgttttgtccaaaaggacattaganaatgtgatgcaagaagagatttataatgtgtgtgtgtaccatcatactaggacacctttgctgcttttgggattcctgaagctgccacatgaaaaccaaa

SEQ ID NO: 947 - DNA, 201 bp, Homo sapiens
  variation 101: note = n = T or A
  source 1..201: mol_type = genomic DNA
cagctacatacctcaagattctgaaaaaggacaactacagaaatactagtaacccaatgtaaaatgtgggagcaattataactgtaatatgtcgatttcanaatgcacatgtcaagtaaatacaacgagacattgggttgtagcagagaaagaagtttaattgtaggactactaaatgaggagctggaaggaaatctcaac

SEQ ID NO: 948 - DNA, 201 bp, Homo sapiens
  variation 101: note = n = C or T
  source 1..201: mol_type = genomic DNA
ggtctcttcttttttttcttttttcttgtttttgcataaaccccctacccttccactctgtaagtcagagcagtaagaggccctccacagatagagaaccngatattggactttctagtctctgtaattgtgagccaaatagacttattttcctcataaattacacagtctcaggtattctgttatagcaacagaaaacag

SEQ ID NO: 949 - DNA, 201 bp, Homo sapiens
  variation 101: note = n = A or G
  source 1..201: mol_type = genomic DNA
aagatttattatctactgttttgttaacatttcaaatcagcatatatagagagaaaacattctgagcaattttatttactaattttcacccagtccctgangaaatgcttggtagatagtaaaaactgaaaaaaaaaaaaaaagattaatcaagagttttttttaatactacagaattgtggaaagaaagcattttgatca

SEQ ID NO: 950 - DNA, 201 bp, Homo sapiens
  variation 101: note = n = T or C
  source 1..201: mol_type = genomic DNA
gttcagaggaggaggagagctaaggtcacctggtctgtattttggccgagtctctcacatttctgcatgaagtctccctctgagctaagccaaactgtgcnacttctcattttctctatattctcttcccattcctacttctgtgccattgctgaaactcttcccttggcctggccttcacttctccacatctgcagtcct

SEQ ID NO: 951 - DNA, 201 bp, Homo sapiens
  variation 101: note = n = G or A
  source 1..201: mol_type = genomic DNA
gtttgatgaaatccaaaatatgacttttttatgcttcagaatttttgtgccttgtctaaaaaaaattgcctacatcaaggttacaaatattttcctttacnctttctttcctgttttataattttggtatttatatttaagtctacaatctattttgaattagttttttttttttttttttttgagatggagtcttgctct

SEQ ID NO: 952 - DNA, 201 bp, Homo sapiens
  variation 101: note = n = G or A
  source 1..201: mol_type = genomic DNA
ttccaaagtaaaaggaataatataaaacatattaatacactgttctttttcacatatacttaagtgtgatttgcccaagattcagccaaacacattatttnccaacaagaaaatgaaggttctgtcgaggctcagaaaatggtaccctaaagtatgtcactttgtcatgctgagcacttagaattaaaggaaattggaagg

SEQ ID NO: 953 - DNA, 201 bp, Homo sapiens
  variation 101: note = n = G or A
  source 1..201: mol_type = genomic DNA
tataatggaactgacttttgtaggtttttaagagccaattatatacacccctttccaatcctgcattcagtgatgtcacattggtagcttaaaatcagccntggttggactatttacaccacggaaattggcaaacactgcactccatggagggatggttgttaaatatttactatacacactactgagtctaaatgacac

SEQ ID NO: 954 - DNA, 201 bp, Homo sapiens
  variation 101: note = n = T or C
  source 1..201: mol_type = genomic DNA
tttccatggaagaaagcaagtttctaagatgttaaatgacttgttgaagtcatgcaactagaactaggctggaccagcatccttcatctgacatttagcanatgcattaaatatgctgctatgccatgtgctctttaatacaatggagatatagcagtcaatatgacatataaagcactatctctcttggagcttacattc

SEQ ID NO: 955 - DNA, 201 bp, Homo sapiens
  variation 101: note = n = T or A
  source 1..201: mol_type = genomic DNA
caggaaaagttcaaagcagattttctgaaacaataaccacaaaaatcccaaactcagtgatttttaaactcaaataatatggtccatgaagatgagaatgntcactactgagagttaaattagtagtctgaaaaaatacacaggggtggaaatattgagggaaaaagtaagagaacttgaaatttggtctggagacctaaa

SEQ ID NO: 956 - DNA, 201 bp, Homo sapiens
  variation 101: note = n = C or T
  source 1..201: mol_type = genomic DNA
aacccagtgaaacccagtgaaaccccattctacagatgaagtcaaatagcttaagtaaattgcctgaagttacacagtgaataagtggcaaaaataggctncagggcctgggttaataattatgctaataattcaaattggtgttatttataagatttatgactttctagccctccaacaatagaaaatgagaacattaac

SEQ ID NO: 957 - DNA, 201 bp, Homo sapiens
  variation 101: note = n = T or C
  source 1..201: mol_type = genomic DNA
agccaactgtggcaacaggagcagaggctcctctctgagccttacctttctcatctatcctacttgtacttctcatagttgttgtgaagagaaaatgaaangaagtagatgctcacatgaaggtattttttacatgtttctgattttctgtttatttctgcccccagactctgcaatgatacatgagagagcagagaccat

SEQ ID NO: 958 - DNA, 201 bp, Homo sapiens
  variation 101: note = n = G or A
  source 1..201: mol_type = genomic DNA
atacagatggagctgcctgaggaatccgagctatttgagtctttccagcccacgcattcaaataggagtgaaaaagcctttgaaatgagagttcatgaganttcctcaacctgaatggtccttatgagccatgctgtgttcctaacccttagaaagtctgagagataataaatgattgttttaaggtattaacacagaaaa

SEQ ID NO: 959 - DNA, 201 bp, Homo sapiens
  variation 101: note = n = C or T
  source 1..201: mol_type = genomic DNA
gcttgttaggatcaagggatgtctattcatttgttcaaatctaacattgtgttgatcaggagtactttaaatttttccttataaacactttggacatttcntattaactttatccttaagtatttgattatctttgttattataaatggggttttctctaccattatgtccaaaaactagttattgtttattacaaaaatg

SEQ ID NO: 960 - DNA, 201 bp, Homo sapiens
  variation 101: note = n = T or A
  source 1..201: mol_type = genomic DNA
tcactgcagccttgacctcctgagttcaagctatccttccacctcagcttcctgaatagctggagctacaggtgtgggccactatgcctggcttgttttgnaacttaaagatgaggttctcactgcattacctaggcaggtgttgaactcctggcttcaggtcatcttcccactagggcctcccaaagtgttgagattata

SEQ ID NO: 961 - DNA, 201 bp, Homo sapiens
  variation 101: note = n = G or T
  source 1..201: mol_type = genomic DNA
gctgctcatagcttttacttattgggcacttcttttatgttgttacttttctgctctagtactctacccatgccttgatacagaatgagaccaagagctcnttattttgcccgttagttgatgcgatttcttcatactgtcgatggtctttacaatttggcatgtttttgcagtggctggtaccgttgttcctttccatgt

SEQ ID NO: 962 - DNA, 201 bp, Homo sapiens
  variation 101: note = n = A or G
  source 1..201: mol_type = genomic DNA
cactgtgggcttcactgtgggagggtctgcctgaacaatagctgtatctgtaagtcttttcttttggtctggtcagattctgttcttctatttggatggcnagtctgggccttaaagctgaatgtgtgaagaaagctgtgggtttttaacattgagaagggttccccaggtctcagctgaatttttttttttttttttttt

SEQ ID NO: 963 - DNA, 201 bp, Homo sapiens
  variation 101: note = n = C or T
  source 1..201: mol_type = genomic DNA
gcctctcaaagtgctgggattacaggcgtgagccaccgcacctggcctgagagaggaagatcttatagagaaaagtgctggtgtgctactgcagatccccnagccatggggaaaggaaggagtattccccctaaaatctaagcaaatgagagagcagggcttcaagaggacctcttgtggagttggacaaatgtcccctgg

SEQ ID NO: 964 - DNA, 201 bp, Homo sapiens
  variation 101: note = n = C or T
  source 1..201: mol_type = genomic DNA
ataggcatattgttttagtctattcatgctgccataacaaaacatcttagactgggtaatttataaaaagcataaacttattgctgacaactatgcaaacngggaaatcagggttatggagactagggaagtctaagctgggggattagcaggtttggtgtctggtgagagcccagacactgcttccacggtggcgccttc

SEQ ID NO: 965 - DNA, 201 bp, Homo sapiens
  variation 101: note = n = C or T
  source 1..201: mol_type = genomic DNA
aaattctagttttctatattactgtagggtgactgtagttgccattagttccttatatattttcaaatagctaaagaaaagactttgaatgaccccaacgntaagaaataataaacttttgtggtgagagatatcttagttaccttaacttgatcattacacattgtatacatgaattgaaatattcttctgtacctcata

SEQ ID NO: 966 - DNA, 201 bp, Homo sapiens
  variation 101: note = n = G or A
  source 1..201: mol_type = genomic DNA
atggcagcactgttatgagatacgggaagggggaattggaaatatcctgttgtaatgtaactacagtatctatgaggtggtacagtgttatttgaaagagngcttggattacttgtaagtgtacattgcaaacttaaaggaaaccactaaaatagtagaagtggtataattgatattgataattgatattttgaagctgat

SEQ ID NO: 967 - DNA, 201 bp, Homo sapiens
  variation 101: note = n = C or T
  source 1..201: mol_type = genomic DNA
tccaagaatttttgtttcaacagtgtgttggaagctttccactgtaccctcagattcccacaaaagtactcttgtcaatagatagttgccagaatctatgnttctgctggggaatgatggtagagagtgcttactctgacatcttgctaataacatttccttattttagcattttgaagtcggtaatcctgcactaggatt

SEQ ID NO: 968 - DNA, 201 bp, Homo sapiens
  variation 101: note = n = A or G
  source 1..201: mol_type = genomic DNA
ctctgcccaatcattctttcttcccttcccttacccaggaattgacctcaagagcactccctaataaacatcctgtaccccatctcagaatctgcttcctnggaaacccgatctgcagtagctgaagtttcttctccaaacaggagcagatggttgctccaaggtgatcattactatcttaatggttgatcagtacaacac

SEQ ID NO: 969 - DNA, 201 bp, Homo sapiens
  variation 101: note = n = T or A
  source 1..201: mol_type = genomic DNA
aaaaaaaagctgagactcaagggagttggccttgacattgaccaaggtcactattccaataaattgagaaactgggacacagcctgaaacatcaatctaanccaaactcaatactttcttcttattctgtgctgcttctccctaccccaccccagccaataaagacatttggttaatatatgcttaacagttatctttcaa

SEQ ID NO: 970 - DNA, 201 bp, Homo sapiens
  variation 101: note = n = G or A
  source 1..201: mol_type = genomic DNA
agtgtggatctggaggaagaaaaccacagaggcgatgtgcccttctcatcacatcacatcaaaggatattacatgatgtcaacatgttctattttggatangatagtgtctgcaagtttttccactgtaaatttcttatatttccgtttctaaactctattctttagaattgctgcaatttttatttcacaatcttcatta

SEQ ID NO: 971 - DNA, 201 bp, Homo sapiens
  variation 101: note = n = T or C
  source 1..201: mol_type = genomic DNA
agtttgatagatgcttgcatttactaaagcatgccaacagttgctttgtgtatctcattaccaactgtgtgactttgggaaagtcagtattcttagtgtcntcatctttgagtctgcaaattagggaggtttaccttctagctaaggacaaaatgctatttcagaaaaaatggaggaaaaatacatcaagtcagtcccctg

SEQ ID NO: 972 - DNA, 201 bp, Homo sapiens
  variation 101: note = n = A or G
  source 1..201: mol_type = genomic DNA
aggaagacttaggagtgagagactttaggttcgaatcctgattcccaccttctgcctccacacacagggaagctgtgtgtgatcttgcacaggttatgcanactctcccaaacctcaatttcctcattagttacaatacctttcttatgagattgggtgactagtaaatgacacggcacatagtaggtctgtagatctttc

SEQ ID NO: 973 - DNA, 201 bp, Homo sapiens
  variation 101: note = n = T or G
  source 1..201: mol_type = genomic DNA
cctcggcaggtggaggtgtgaatgttgggggccgccgaacactaggaagtgtcctcatgcatcacaattacagaaacacctgtgctaaatacctttgtgcnggttggttgtgcaaattcacgaggtgttcaattgcttccaaatttcttatttctacactgtcaacaagccgcaggtgtgcacggcatgagccgccgccgc

SEQ ID NO: 974 - DNA, 201 bp, Homo sapiens
  variation 101: note = n = A or G
  source 1..201: mol_type = genomic DNA
tgtgagatgtggacaatagtagctcctaccatcggggttattgaaaagatgagttgagctgaggaatggaaaggactcagtgcacatcctgtgcattggcngtgcgctataaatataattctcagtttattcatttagcaccagggtcggcaaactttttctgaaaaggaccagatggtaaatatcttcagctttgcaggc

SEQ ID NO: 975 - DNA, 201 bp, Homo sapiens
  variation 101: note = n = G or A
  source 1..201: mol_type = genomic DNA
atgtacaaagagagaaaaagaaagatgtttattttaagaaattggctcacacaattatgggtgctgctaagttcaaatgtgcagtgttggccagcagaccngagactcagtagggcaaacagtggggatgcagttccagtgtgagggcaatctgctagagaattcccttttgcttagggagggcagtctttgtgttccatc

SEQ ID NO: 976 - DNA, 201 bp, Homo sapiens
  variation 101: note = n = C or T
  source 1..201: mol_type = genomic DNA
atgtacgcttgtataaccaacacacattcacaaaatgatcaactttcatcaatgtagaaagtttcttctttctcctttttcaggtagtcaccctccaggcncaggtgaccattggtctagtctctaatgttatagattagttttggctgttcaataacctcatttaaatacttacataatgtgtttgtcttattattgaag

SEQ ID NO: 977 - DNA, 201 bp, Homo sapiens
  variation 101: note = n = C or T
  source 1..201: mol_type = genomic DNA
ctcagcctgaaatatgcccctttcagtttatcctctattgagaactgacagagatagctcacaggacactttgtttccaggacccattcagtgactttatncttatctttctacctttccctcatcatgttctgtgattccaaaacaatggatatactcagaggttatagcacttatgtatgcactgtactgattccaagc

SEQ ID NO: 978 - DNA, 201 bp, Homo sapiens
  variation 101: note = n = A or G
  source 1..201: mol_type = genomic DNA
ccagcttgacagccatgtaagtgagccatcttggaaatgtattcaccagaccagctgggctgctgatgcctcatgggattgagatgagcacaccctgttanactctgcccagagtataaagttgtgagacaaaaatgtgattgtttttattttaagccaccaaattctgggtgatttgttatatagcaataggttacaaaa

SEQ ID NO: 979 - DNA, 201 bp, Homo sapiens
  variation 101: note = n = A or G
  source 1..201: mol_type = genomic DNA
tagatggtcattgaatgatagaattattttgtataaaaatatttaattacattttaaaaaacactgtagtcttctttaaaagattattggggtcaaaagtntgataatgataacttggttgatataaataaaggtataaaagacagaattttggcccaaatccagaagcactctggctgtgagtgaccagagtttgaatat

SEQ ID NO: 980 - DNA, 201 bp, Homo sapiens
  variation 101: note = n = T or C
  source 1..201: mol_type = genomic DNA
agtgggaggatttgcgaagaagctgtttttatttggctgtctcagctgtttgagcagaagtatgttttttaaacaggttgctggaaggttcacaaagtaantggaaggcctagcatcttcctactgcaccaagtctgggcttccaagaacagtgacccaaactgcactgcagaactggccttacaatgaacccacaacccg

SEQ ID NO: 981 - DNA, 201 bp, Homo sapiens
  variation 101: note = n = C or T
  source 1..201: mol_type = genomic DNA
tacatagtgcattcaatgtgctcagggtggcagagctataaaccagaaggaatctgaattcttgatgccatccctgaccagttatgctcttcctaaaagcnctccttccagactttcttcgcaaatgaggaaaagaaactcctgcttagataagccccttgatatggtttggctgtatccccactcaaatttcattttgaa

SEQ ID NO: 982 - DNA, 201 bp, Homo sapiens
  variation 101: note = n = C or T
  source 1..201: mol_type = genomic DNA
aatgcatcactacatcctgttctaggtacaaggactagaacagcagacaaaataaacaaaaatcccaccccaatggagcatacattctactgagggaaaanagataataaacaacagaagaaagaaaaatatgcagcatgttaggtagagataagagctattaaaattaataggtcatggggaagagaagaaagagtagat

SEQ ID NO: 983 - DNA, 201 bp, Homo sapiens
  variation 101: note = n = A or C
  source 1..201: mol_type = genomic DNA
ctagtttcatgggaagatatttcctttttcaccataggccacaaagacctcacaaatatcaccttgcagatgctacaagaggaaggtttccaaactgctcnatcaaaagaagggttcatctctgtgagatgaatgcacacatcaaaaataagtttcctagaaatcttctgtctggtttttatgtgaagatatttccttttt

SEQ ID NO: 984 - DNA, 201 bp, Homo sapiens
  variation 101: note = n = G or A
  source 1..201: mol_type = genomic DNA
caagaggctttgattctaggctttctgtttcttgtccacttttttctatccttctgctaacaccatattatgtttagataatttcataataaatactgatntctgttatgtcgtgttctcccttcttgcttttcttcctcagaaatgtcctaggtagtcttgatcttaattatccttataaattttagtaccatcaagttt

SEQ ID NO: 985 - DNA, 201 bp, Homo sapiens
  variation 101: note = n = C or T
  source 1..201: mol_type = genomic DNA
gagcagagtattccagaaaactggaacaaaacttgcgaaggcctaatatgagaataagacagagattttccggcaagtgaaagagtgtcagtgttgatganatactatggttgtggaatgtagtcagggaggcagaaagagagaacaggtcaagtagggtggtagtagctgtgtaaaacaagtggattttcttctacttct

SEQ ID NO: 986 - DNA, 201 bp, Homo sapiens
  variation 101: note = n = C or T
  source 1..201: mol_type = genomic DNA
gaactatgatttagatcacatttctcagaatcatccaaggatgacttgcatcagaattaactagctggcatcttaaaaattcagattcctgaacctcatcngggattcattgaatcaaaatctctggggattttagcactccaagaaattcatatgtgaaccaaagtttcagttgttcatctaataaaatacgatgtttct

SEQ ID NO: 987 - DNA, 201 bp, Homo sapiens
  variation 101: note = n = T or C
  source 1..201: mol_type = genomic DNA
acttaccaggaactatgctgagtgtgttatatacattatctaatgtatttctcacatcaactctgggagaaatgtattattatggcagttttactggtgangaatctgaccagtaaaactatgtattttaaggcaaattgtatcatttgccttaaaattatatcatttgccctgaaatgcatagctagtaaacagcagagc

SEQ ID NO: 988 - DNA, 201 bp, Homo sapiens
  variation 101: note = n = C or T
  source 1..201: mol_type = genomic DNA
ctgtcctttcttgctcatgttgccttcacacatgctgttcctttcccctggactactcctcttccctcttctctttgttccttcacctggatcactcctanttatctcaagtcttcacctagatggaaatttctccagcatcctcctcaatctttccaaacttctaagggttaggtgccctacccatgtggtcttgtagca

SEQ ID NO: 989 - DNA, 201 bp, Homo sapiens
  variation 101: note = n = G or A
  source 1..201: mol_type = genomic DNA
gcccaccccctgtgctcaagtggtaacccctgctaagaatgtgcctaggccttagaatcagatttagatcagctgaggcacagcagggatgagaaggcacnctgaaaaccaagcaactggtggagaatttaatacagggactatttacaacaatgtgagcagccttagggaaactaacaggagatggggcagagcaggcca

SEQ ID NO: 990 - DNA, 201 bp, Homo sapiens
  variation 101: note = n = T or A
  source 1..201: mol_type = genomic DNA
atataattttacaacttctatttctcattcaatatttttgaagagctacccataatagtatgtattagacctaccctattctttttaactgatgcatattntcttgtcatatgactacaatttatttgagtgtaatacaatgtatctgttcatcaactgataggaatctgggacatctttgtacgtaccactttgtgcagt

SEQ ID NO: 991 - DNA, 201 bp, Homo sapiens
  variation 101: note = n = C or T
  source 1..201: mol_type = genomic DNA
atcagagcaaatttcactttgtggatattcaatatgtatgcatatatttatctagatcctgccttgttctaaaaagatttgaagtgcctcgtgtgttcaanaaacgtgtacaatgaattaatcaattaatgggctaatggatgtgagagtgctttgaaaagtataagatgaaacagatatatttctttatgagaatagtga

SEQ ID NO: 992 - DNA, 201 bp, Homo sapiens
  variation 101: note = n = T or C
  source 1..201: mol_type = genomic DNA
ccctttgcaagagaactagtgagagagggactatttgttgatactcagtactgtccccaccattgtcagctctttcctggtatacagggcagacagccagnaaattatctttcccagatgcccttgacagcctggtccctgtaagggtccaccaaggagatgcacttgttcaagatgtaaaagatggaagagaagaataag

SEQ ID NO: 993 - DNA, 201 bp, Homo sapiens
  variation 101: note = n = G or T
  source 1..201: mol_type = genomic DNA
ggatttctgcttttgtgaagcacccattcacagcttttgttcatttcacttcgtattttctatattttcccctattctgtatgcatgccctttgccagttntataaattacagagtcttccactttgtctatttttttttgttcactttcttcatggtatcttttcatgagcagaaggtattctttcctatcttaggataa

SEQ ID NO: 994 - DNA, 201 bp, Homo sapiens
  variation 101: note = n = G or C
  source 1..201: mol_type = genomic DNA
tcttgatcctcctggcatggaattccccctacgaattagctgggtttagggtgattcaaacccccgtattcctggcctgcagcacatgtcttaaagcttcntctctgagtaggatctgtgtgggagaaaggaaattggccctctctaaatgtccgctcagaatagagcttcatcgacatggggctggaggggggcaaacac

SEQ ID NO: 995 - DNA, 201 bp, Homo sapiens
  variation 101: note = n = A or G
  source 1..201: mol_type = genomic DNA
agaaatgcagatatgataatgaataggaagtcagtatttttttttccatatacttctgttttcttttctaaaaagtgggaagtgagattatttgttgtgcnttgttgaaattatgggggaaaatggtggaatgtgaatgtatcaagtttagtcaggaaaacagaaggcatctttattcaaatgcaagaatgagggatttta

SEQ ID NO: 996 - DNA, 201 bp, Homo sapiens
  variation 101: note = n = G or A
  source 1..201: mol_type = genomic DNA
aaggtctgtgttgatgtaaatgccagagaggtataatgaggcatgttcgacccccacttcctgtcatggcctgaaacagtctctcagttggtaacctttanaagagccctgtctgcgcctgggcacagtggctcacacctgtaatcccagcattttgggagactgaggtgggtggatcacttgagctcaggaatttggaac

SEQ ID NO: 997 - DNA, 201 bp, Homo sapiens
  variation 101: note = n = A or G
  source 1..201: mol_type = genomic DNA
agaaaaggagatatcttaacataaaaactacacagaggcattctgagaagcttctttctgattgtgtacattcaactagcagagctgaacctatcttttcntagagcagtttggaacctcactttttgtagagtctgcaagtggttatttggagccctttgttgccaaaggtggaaaaggaaatctcttcacataaaaact

SEQ ID NO: 998 - DNA, 201 bp, Homo sapiens
  variation 101: note = n = T or G
  source 1..201: mol_type = genomic DNA
caaaatagttccttacgtactgtgggtacataccaaggggtcttcaaaaattcatggaaaatgcactcatgaaaaaaactatgcatgcattttaatttttnggggatcaaaataaactcatactaacttgttataatatgtctaaacaggatctagccgatgctctaagaaggataagacatcagtttgaaaagagccctt

SEQ ID NO: 999 - DNA, 201 bp, Homo sapiens
  variation 101: note = n = C or T
  source 1..201: mol_type = genomic DNA
ggaaacatgctagcgggactctctcttgctttgctgagagttatttttccattatccttttcacccagtaaattccattttcctcacccttctttatgtcngcgagccttatctttcctggtcgtatgacaagagactggttttagccaaactaaggagaaaattctgcaacggtagcaagagatagaatctattactgcc

SEQ ID NO: 1000 - DNA, 201 bp, Homo sapiens
  variation 101: note = n = A or C
  source 1..201: mol_type = genomic DNA
aaattaattagtaaaagttagaaaaaatattaaaaataaatattaagaagaaaggttatagaatgataaaatagtgtctcagattgtgttctccaggaagnagacaatgaaatggaggtaggagtgcaaaaggtttattaaagagtaacaagtgtgaaagtgtaagggaaagaagcaaaattgcacagggggagccatcag

SEQ ID NO: 1001 - DNA, 201 bp, Homo sapiens
  variation 101: note = n = C or G
  source 1..201: mol_type = genomic DNA
aaagggttgcaacacgatgaaggttcaggtgattgttagcatttttttttttagcaatagtgtatttttaaactaaggtatgtacactttttagacatttnctatcacacacttaatgaactacagtacacagtgtaaacataacttttacgtgtactggaaaaccaaaaactttggttttttatgctttgttttgttcag

SEQ ID NO: 1002 - DNA, 201 bp, Homo sapiens
  variation 101: note = n = G or A
  source 1..201: mol_type = genomic DNA
ctctgtctcaaaaaataaatgaataaataaataaataaatacaaaaaaaagaaaatgaaaaatagtaccactttggaaaactgcttggcagtctctttaanacttaaagattggcctgaagttttttgttgttgttgtacctccgccaggttttagtatcagaatgatgctggcctcataaaatgagttcggtaggagtcc

SEQ ID NO: 1003 - DNA, 201 bp, Homo sapiens
  variation 101: note = n = T or A
  source 1..201: mol_type = genomic DNA
ccaggtataaaaatggcaaagcatttgatattgccatacatgtctttgaggctcttttaaatttaaatctttcttttctttgagtttcagcttggaaaagntttacttgatctcatatttactgtctctctcatcagtaatatttaattttgctatatagtaccatctggtggtactaaaaattttaatttcaaatgttgc

SEQ ID NO: 1004 - DNA, 201 bp, Homo sapiens
  variation 101: note = n = G or A
  source 1..201: mol_type = genomic DNA
gttcatactacatatttgctactttgcatactttcacctacattttcccatttactcccttcatgtcaaccctgataatcactatttattctctatgtgtntatatttgaacatttttttctagatttcccttataaatgagatctttgctgacatatcagcctctccaagaaaacttcccttgccaccttcctcatagca

SEQ ID NO: 1005 - DNA, 201 bp, Homo sapiens
  variation 101: note = n = C or A
  source 1..201: mol_type = genomic DNA
tctgtgtcttggacagtcacgggacaagatggtggatccccgcaccattacccttcagacccagggcttatataccgcagggaaagtgtgtacatgcttcncaagggaggcttaggtcaattgaagtacggtaacatcaagggattacaccttgggaattatggtaaataaatttaggctttatagtaagtccctgctctt

SEQ ID NO: 1006 - DNA, 201 bp, Homo sapiens
  variation 101: note = n = A or G
  source 1..201: mol_type = genomic DNA
ctcagctgtttcccttgcacaagccccagaatagagcctcatcgaggaaacatgcttggcttgtgttgatttctattacctggggaatctaagagcccatngtctgtaacacaggtactctatactatctggggtggtcatctagtctaaatttaaatgcatcagaattagggaactttattatatgctgccgctactact

SEQ ID NO: 1007 - DNA, 201 bp, Homo sapiens
  variation 101: note = n = T or G
  source 1..201: mol_type = genomic DNA
cctagagcaggagaagatgaatgttccagcccaagcagacagaagatttatccttcttctaccttttcattctgttcaaaccctcaacaaattgtatgatncccatctacattggtgtgagtgatctttgcttcatctacgaattcaaaggctgatctctcccagaaatacccttacaaacacacctagacagaatgtttt

SEQ ID NO: 1008 - DNA, 201 bp, Homo sapiens
  variation 101: note = n = G or A
  source 1..201: mol_type = genomic DNA
ccagttatatggtcaacagtctagatgttgctgtgaagatattttaggtgtgattaacatttaaatcagtagactttgagtaaagcagattactctgcatntggtgggtgggactcatctgactgagatccctcatggaaaagggaattccactttcagactgcctttgtattctggactgcagcatcaatggttccctgg

SEQ ID NO: 1009 - DNA, 201 bp, Homo sapiens
  variation 101: note = n = G or C
  source 1..201: mol_type = genomic DNA
ctgagtctgagcctctggaggcagctggggtagcctcctgtccaagccttgccagggatggataaattggtgcacagggggtggactttctaacacttcangttgggcctgtaggacaggttttttctgcttttcctgtaactcctattctttttctgatgccttgcagcctctttctattgtccctggttttgtctgggc

SEQ ID NO: 1010 - DNA, 201 bp, Homo sapiens
  variation 101: note = n = T or C
  source 1..201: mol_type = genomic DNA
agggaaagtgggatccttaaggtagatccgaattggtatggtggccgaggctcagtcagtttttcattgacttacccaaacttctggattaatatcggtcncaaccatgaggagacagagagtctgtccaggagccataagaatagtgattcccatatgagctaaaatgtcccttcttagcagagaagttgggctttcagg

SEQ ID NO: 1011 - DNA, 201 bp, Homo sapiens
  variation 101: note = n = A or G
  source 1..201: mol_type = genomic DNA
ttttaccattgttcagggagaaactgctttgggaactatcccagtgtcctccttatttgatacaagtaataaaatcctcatgctaaatacttcttggttgnggtcattggattgtcaatcgccaagtgatcaaagcccacattgtgtaacaatttctgtacaataagttattttaagagagagagagagatcacattaaca

SEQ ID NO: 1012 - DNA, 201 bp, Homo sapiens
  variation 101: note = n = T or C
  source 1..201: mol_type = genomic DNA
atcatcttgcaccagcctaaatgactattactaaaatgtcagaaaataacacatattggtgaggatgtgaaaaaagggaactcttatacactgatggtggnaatataaattgtacactgtccatagaaattaatatagagatttctcaaataactaaaaatagagctaccattcaatacagcaacttcactacttgatatc

SEQ ID NO: 1013 - DNA, 201 bp, Homo sapiens
  variation 101: note = n = A or G
  source 1..201: mol_type = genomic DNA
actgaaacaataaagaaaatgaaagtcaaacaccacatgttctcacttatacattggagctaaataatgtggacataaaatatggaataatagactttcangctaggatagagaaggagaaaggaggtggtggtgagaaaccagttaatgggtacaaagtacatggtttgggtgatggataaactaaaagtcaagacttca

SEQ ID NO: 1014 - DNA, 201 bp, Homo sapiens
  variation 101: note = n = G or T
  source 1..201: mol_type = genomic DNA
atccgcccacctcagcctcccaaagtgctaggattacaggcatgagccactgcgcctggccacaaggtgatgtttttatatatgttttgtatagtgatcanttcagtgtaattctgtatctatcatctcaaacattatttgtttctttccattggggaccttcaatatgctcctactatctctttgatactatatattatt

SEQ ID NO: 1015 - DNA, 201 bp, Homo sapiens
  variation 101: note = n = C or T
  source 1..201: mol_type = genomic DNA
tctttccatgttttcatgtctctttcccattagactaaaatctttgagaacaagtattactgtgtaacactgagtgttgcaatcccacagccttgctatanacatattacccaaaaggttctcagtaataatcctgtaaagaaagtaattcatttctgatatttaaacaccacactgaaaagccttgtactgtgcttactc

SEQ ID NO: 1016 - DNA, 201 bp, Homo sapiens
  variation 101: note = n = T or C
  source 1..201: mol_type = genomic DNA
ggactaatacacaagaaatttctttatgggaaaattatgagggaagtatatagctttttttaatctttgtagctatcttatttaggaataaaatgggaggngggcttgttccatgcttgactttcatttggcttcctgattttggggtcccaagatttattttcctttcacaaaacatataatacatgcaaagcaacagtt

SEQ ID NO: 1017 - DNA, 201 bp, Homo sapiens
  variation 101: note = n = T or C
  source 1..201: mol_type = genomic DNA
tcttgaatataaatggggtggggcataaaagattttgcagtaatttaaagatgaaatgaaggttggaataggaagtagtagcaaagagggaaacagtgaanagaattaaaacatattttggaggcagataagttcttttgcagtttggcatatctctatgtcaaaacctgtgaaggactaagatttttttttctactggta

SEQ ID NO: 1018 - DNA, 201 bp, Homo sapiens
  variation 101: note = n = A or G
  source 1..201: mol_type = genomic DNA
agataattttgtccaggatttcaattctgtcttgattttttttagaggtggagtctcactatgttgcccaggttagagtgcaatggctattctcaggcatnaccatagtacactatactctcaaacttcgcattgaagggatcccaagtagctgggactacaggtttctgccttgaattttttaaccacacaaattaggta

SEQ ID NO: 1019 - DNA, 201 bp, Homo sapiens
  variation 101: note = n = T or C
  source 1..201: mol_type = genomic DNA
atatgaattttaggatttttttttctaattctgtgaaaaatggcattggtaatttggtagaaattccactgaatctgtagtatcatgattttaatgatagngattcttcccatccatgaacatctcgagatgttctcttatttgcttgtgtcatctgcaattcctttcatcttgttttgtagttctccttataaagatttt

SEQ ID NO: 1020 - DNA, 201 bp, Homo sapiens
  variation 101: note = n = T or C
  source 1..201: mol_type = genomic DNA
attccagaccagtacctgtggactaagactccagaaccgccaggtggagccatatagcccctggcttccggcttgcatgacagactcaatcaatctctcangttttatgtgtctgaaaatgtctttatttaaactttgtctttcaaatatattttttgctgcataaggattttagtatgattgctttctttttatatttta

SEQ ID NO: 1021 - DNA, 201 bp, Homo sapiens
  variation 101: note = n = G or A
  source 1..201: mol_type = genomic DNA
gtgtttcagtgggagaatcctctattggcttaaatttgcctgggtggttcccaaactgttggatgaatagagcatcctaggaagcttatgaaaaatgtctntttctagacagtgtaattcaataggtcagggtgagttccagggattagcacccgtgtgatcaacagccgatggtcctcacaccacatcttgagaaatctg

SEQ ID NO: 1022 - DNA, 201 bp, Homo sapiens
  variation 101: note = n = C or T
  source 1..201: mol_type = genomic DNA
acaaactgcaggtccccaccctcaaagcttctgattcagcagggctgggcagagtctgataacttactttatgtaacaagttcccaggtgatgttgatgcngttctttgggaaccccactttgagaaccgttgctcttgggtattcccattgtggccaccagctggttaagagtcagactttgacaaataccaaatgttat

SEQ ID NO: 1023 - DNA, 201 bp, Homo sapiens
  variation 101: note = n = G or A
  source 1..201: mol_type = genomic DNA
tctgattcagcagggctgggcagagtctgataacttactttatgtaacaagttcccaggtgatgttgatgccgttctttgggaaccccactttgagaaccnttgctcttgggtattcccattgtggccaccagctggttaagagtcagactttgacaaataccaaatgttatgctccttgttctgaggtgtatgaggaggc

SEQ ID NO: 1024 - DNA, 201 bp, Homo sapiens
  variation 101: note = n = A or G
  source 1..201: mol_type = genomic DNA
tacctaaataattaggtattctggaaaaggaggggatgatggagaccgtggttactgccacctttctctttcacttgcgtttgtctgaagagtcatggacntgtcaccttaactgaagtgctggccattttctctcccttattttgggttttctgttattctgtgatttctttgcctagttcttgttttagctgtttgggt

SEQ ID NO: 1025 - DNA, 201 bp, Homo sapiens
  variation 101: note = n = A or G
  source 1..201: mol_type = genomic DNA
tgtggtctgccctgtggactcatgataactgaggtattactcaatacatatggcatttcaggcaatatgctggtaccatacctgtatttcatggtctgaantactttgcaccagatctcagttagacataagcttctttgcaaaatcacaggacttcaatgcttctttagtcttctctttttttttttttttttttttgga

SEQ ID NO: 1026 - DNA, 201 bp, Homo sapiens
  variation 101: note = n = T or C
  source 1..201: mol_type = genomic DNA
tttgcttatcctcttgcttcccctctgagcttaatctcccttgcatttctcctgaaagattgcaaaatattactaggttatgttctgtccttaaccaagangaatcattttaagactcaataaagtttgtgtgaattctctctttaaaacctccaaaaaccctctattcccagtagaataaagagtaaatcaagaatgtag

SEQ ID NO: 1027 - DNA, 201 bp, Homo sapiens
  variation 101: note = n = T or C
  source 1..201: mol_type = genomic DNA
gtgtacccacggacattcagagtggattcataaacattggaggctccaaacagtgatagggtgggtgagggggtgaaggatgagaaattattaacacctantggatacagcgttcgctatttgggtgatgggaatactaaaagcccagatttctccactagacaatatatacatgtaacaaaactactcttgtaccccata

SEQ ID NO: 1028 - DNA, 201 bp, Homo sapiens
  variation 101: note = n = G or A
  source 1..201: mol_type = genomic DNA
ttctccccagtcttccctcccctttccaaaagcagaggagtctcactccattgccatcaccaccccaggccacaaggagtactgccagcctacaaacaatnttcccttaaggcccaagggctcttcagtcatcttgtggtaaataccacctggactttgactcatccttcagggtagtgagatcccctctggcccagagca

SEQ ID NO: 1029 - DNA, 201 bp, Homo sapiens
  variation 101: note = n = A or C
  source 1..201: mol_type = genomic DNA
gccccagaacatggtctttttaggaagtctgcagcctgctgcggtggccagtggggattccaggcaagtgggttttagcgtgtggggacccatgggagcanggccgcttggctccctggcttcagtacttttcccacggaagtggacggatctcctgcctcacgggagttcccagagcgcaggatgcagatactcctgtgt

SEQ ID NO: 1030 - DNA, 201 bp, Homo sapiens
  variation 101: note = n = T or C
  source 1..201: mol_type = genomic DNA
tgaagaatcagaaaatcagtgtcttttcttggatcagccagacgtctcagggcaaagtgcctaccaaaaactagagagacagataaagacataaacagacngtgcctatgtgttggcataggggggatatggaaagtctgtaacttctgctccatttttttatgaacctggaactgctctaaaatgaactctagttaaaaa

SEQ ID NO: 1031 - DNA, 201 bp, Homo sapiens
  variation 101: note = n = G or A
  source 1..201: mol_type = genomic DNA
ggttcttatattgacttctgctttcaatctgcttcaatatgttgttctgagtgaagtatattaaggaaatatggcctcatacagatatatagttggcaganaggaatatttacttgtcttttcagataattcaagatattcttcttggatgctatacctaaactcattaagtggtagtatcttaagcttgttgctatgtag

SEQ ID NO: 1032 - DNA, 201 bp, Homo sapiens
  variation 101: note = n = G or C
  source 1..201: mol_type = genomic DNA
aactggatatgaataaggcaactgttatgggtaaggctaccttgaagcatattctacactagagctgtgcaggatgtttatttgggagtgctctagagatnaattccatgcaagactaaaagaaacagaagaagaattgagcagaggagttatagatgtagcctcaaggaaggccttaggcaacaccacaggaaactccgg

SEQ ID NO: 1033 - DNA, 201 bp, Homo sapiens
  variation 101: note = n = G or T
  source 1..201: mol_type = genomic DNA
tcagcagctatttagaattatctacattttctattgttcaaaaattcattgttatgtctagtttttcagttctctctctctcttttttttttttttttttngcttgtttggttgaaacccatcctcataattctttcagaaagatttgttcgtggctacagttttgagctcgtttcaaaaatgtttttattttgctctcac

SEQ ID NO: 1034 - DNA, 201 bp, Homo sapiens
  variation 101: note = n = A or G
  source 1..201: mol_type = genomic DNA
catcgatgtacagccatttagattgtgcactgagtaactctgggtgccatttacatcatagattatgaggtaattcatattctttggttttgtgtaaggcngtagctctggttatcatcactccctgaagtgtttctcacttaattgaatgtgtcaacattaacatttcaaagataagattgagtctctggatgatttctg

SEQ ID NO: 1035 - DNA, 201 bp, Homo sapiens
  variation 101: note = n = G or A
  source 1..201: mol_type = genomic DNA
cctcctgcctcagcctccctaacatgctgggataaccagagtaagccactctgtctggccaggaatgtctagtcttctgacagaggaaaaagagatgatancgaatcacatactggcctgcaatggttctgctcatggatgacaggtgttactttcactcaaatgtcattgggaaaatcaaatcatgtggcaagagtaaca

SEQ ID NO: 1036 - DNA, 201 bp, Homo sapiens
  variation 101: note = n = T or G
  source 1..201: mol_type = genomic DNA
gaggggatggacaagatttatttaaagtgccactaaacttgctatactcacttgagatgtagctatgttttctagcattattctgggattattcttgaatnattgcagtcttttgattcattttcaaaatttcggaattgttgatttcgtaaaaattcggccattattctcaatacttttatgcagaagaagacttttgga

SEQ ID NO: 1037 - DNA, 201 bp, Homo sapiens
  variation 101: note = n = C or T
  source 1..201: mol_type = genomic DNA
ttttttcaacaagtgtgttctgatagtccactatttgtgcaaagtgctgaggatacagtggtaaatataataaatacagcccataacctcatagaggttangctcttacagatgctatgcaggtatgggggtgaacatcttctaaaatgaggctgaattagaagatgatttttagacagatgtcctaagctaagattataa

SEQ ID NO: 1038 - DNA, 201 bp, Homo sapiens
  variation 101: note = n = C or T
  source 1..201: mol_type = genomic DNA
tttaaaaaactgaagagaagctttttactccttttatatattttccctgaaacttttagccaccacagtcatcaaccattgatcattttgcagacacacanacacacacacacacacacacacacacacacacacacacacacaatgtcagttacaggtgaaagcataagacgaagacaaaaatgtcacttctttccatta

SEQ ID NO: 1039 - DNA, 201 bp, Homo sapiens
  variation 101: note = n = G or A
  source 1..201: mol_type = genomic DNA
accatatcttaaagcatttacctggtagcagggacataaattcaaactttgtcaccagggaccagtttcttggaaggcaatttttccatggggggaggcangaatagtttggggatgaaactgtttcatcttaaatcagcaggctttagattctcataaggaatgctcaacctagatcccttgcatgtgcagttcacaaca

SEQ ID NO: 1040 - DNA, 201 bp, Homo sapiens
  variation 101: note = n = G or A
  source 1..201: mol_type = genomic DNA
cctctgtcactccatctgtaaattgggaattatcattgtgactacttcacagagttgtcatacagattaataagatgatgtatgtttttacactcaatatngtacccaagatgcagaaagtattcaataaatattcatcataatgatgatgattctcaataaataaataaataaataaataaataaataaataaataaata

SEQ ID NO: 1041 - DNA, 201 bp, Homo sapiens
  variation 101: note = n = T or G
  source 1..201: mol_type = genomic DNA
acttcatgttgaattttataagaaactgccaatctgttttccagagtagctgtaccattttacatttctaccagaaatgtgtgagtaatctgatttctttncatcctccccagcatttggtatttcactatttttaactttagccattctgataagtgtgtagttatatctcattgcggttttaatttgacctccccaatg

SEQ ID NO: 1042 - DNA, 201 bp, Homo sapiens
  variation 101: note = n = T or C
  source 1..201: mol_type = genomic DNA
gggttgggaggtatcttgctttccagagaaggcaacatttggtgagagtctccagagtacaattaattgccaggttgagaaaaaggtgtgaatggtatagnaggcagaggaaacagcatgtggcaagccactaaaatatgaactgaaaatacaagttttggagaatgtttttcattcattgtggctgggactagtagatgg

SEQ ID NO: 1043 - DNA, 201 bp, Homo sapiens
  variation 101: note = n = T or C
  source 1..201: mol_type = genomic DNA
atatagaggaagaaataaatgaatagtaaaacaagacaataattgaccatatatgatgatgcaccataggctaggaaatttgactagctcaacttatgctnctgagatccaataaataaacaaagtatcaattaaaatggaagtgtttcaggcaaagggaataatgtgcaatttgcagaagtaatggaggacatgatacat

SEQ ID NO: 1044 - DNA, 201 bp, Homo sapiens
  variation 101: note = n = G or A
  source 1..201: mol_type = genomic DNA
tgtacagattgtttcatcacgcaggtactcagcctagtacccaatagttattttttgtgatcctctccctcctgccaccctccaccttcaagtaggctccngtgcccattgctttcctctatgtctccatgtgttctcatcatttggctcccacttatgagtgacaacatgcagtatttggttttctgttcctgtgttagt

SEQ ID NO: 1045 - DNA, 201 bp, Homo sapiens
  variation 101: note = n = T or C
  source 1..201: mol_type = genomic DNA
aagactaagttcattgaacttcccaactcctccaacttaaatggggccaggtgatttccttcatgtagtgaaatgtgagaagttacctgtgactcccaganagaagaagcctttaagatccagtgtgaaatccaccatatttccttcccttccttggtgattggaagcagcccaggtgctgaaaacttcatccatcaactg

SEQ ID NO: 1046 - DNA, 201 bp, Homo sapiens
  variation 101: note = n = C or G
  source 1..201: mol_type = genomic DNA
tattccatatgcactgggctccttgcccttctttgtctgtgtcaggcatgttctagccacagagctttaatccttgctgttccctctgccaaagaacgctntttctcatagaccagtgtggctagctccctggggtcttttcccaaatgttgtctcttccaccaggcattccctggccaccctacttaaattgcaactcct

SEQ ID NO: 1047 - DNA, 201 bp, Homo sapiens
  variation 101: note = n = G or C
  source 1..201: mol_type = genomic DNA
gccaagatcttccagaagcaactgtaggtcagagtggtgggagaaattgtaggaaaaacgcaaaccttcttggaatgccagggggttttgcaaagctttgngggagaatgagccaaaggtggcggttcttaccctggggcaaagggtgagaagtaggtacaaaagaaaacaggggagtttatctgaatagcttgtttactc

SEQ ID NO: 1048 - DNA, 201 bp, Homo sapiens
  variation 101: note = n = T or C
  source 1..201: mol_type = genomic DNA
gataaacataatgatagggtaaatcttaaataataggattaaataaattaaaactctcaaagtgcttaaaacaagaactagcacatagtttgcaagcaatngataaatacgaataaaatttatttgacatctattgtgttctaaataatttaaagatacgacctaatttaagctacactaccttcttgagaggttactgtg

SEQ ID NO: 1049 - DNA, 201 bp, Homo sapiens
  variation 101: note = n = T or A
  source 1..201: mol_type = genomic DNA
accatgttgcaaaagaaatacttttatcctttttgatgactaaatattattccattgtgtgtgtctgtttgtgtatgtattccttttttgtgtttgtttcnatttagtgtgtccacattttctttatccaatcatccactgatgaacacttaggttgattctatatctttgctattatgaatagtgttgtgataaacatat

SEQ ID NO: 1050 - DNA, 201 bp, Homo sapiens
  variation 101: note = n = G or T
  source 1..201: mol_type = genomic DNA
ggctattcagggaaacaggcttagctttaaaaaactgtccttttgtaaaagaaaactacttctagaaagaaaatctacattagtgaagcaaagagtggatnctgtctttctcttaaagcccctcctctgccttatgtggatctaggaatgattaactcacaggaaaaggaaattaagagtctaacacattttaaggtctga

SEQ ID NO: 1051 - DNA, 201 bp, Homo sapiens
  variation 101: note = n = G or C
  source 1..201: mol_type = genomic DNA
tcattgttcagcttacacttattaatgagaacattctattcatcgcaagtgtcactaagtacaggccccacttgagggcaggagaaatataagaccatgantgtcgtagagatggaaattattggtctactttagagactgtcaaccatgatacaagttgccttaatatataagatatttcaataaatgtcaattgaaatc

SEQ ID NO: 1052 - DNA, 201 bp, Homo sapiens
  variation 101: note = n = G or T
  source 1..201: mol_type = genomic DNA
ggattccaatcaacaaattaagctaatttcttattaattaaactcattgagggcagaagttttattcaatgagtccccaacatagttaactgagttcatantaggttgtgaataaataataaatcagaataagttccttgtgaatgggcaaaaacacagtgagtttgtacctgtggtgagattcctgtctcaaaacttcca

SEQ ID NO: 1053 - DNA, 201 bp, Homo sapiens
  variation 101: note = n = A or G
  source 1..201: mol_type = genomic DNA
agcaaaatatccagccaaagtccgtcttggatgttcagacctatacatctctgtcttcccccatctcctgttagaagtttataatcatcatacattttacntaagccaaagaatgctcataatttttacattctaactctagcctgcttctctcctatcttctcccatttccttgagtggtatcactaccactaatgttac

SEQ ID NO: 1054 - DNA, 201 bp, Homo sapiens
  variation 101: note = n = G or A
  source 1..201: mol_type = genomic DNA
ttattgtagaatctttcacctccttggttattgtgtatatatgccatttttggtagctgttgtaaatggattgttttcttgatttctttattagctagttnttggtgtatagaaatacgactgatttttctatgttgattttgtatcctgtaactttgctgaattttttgatcagttccaagattttttggtggagtcttt

SEQ ID NO: 1055 - DNA, 201 bp, Homo sapiens
  variation 101: note = n = C or G
  source 1..201: mol_type = genomic DNA
ctacagcataacctaacttatgctgacttcaatactttgcaagcaggaaaaaagcatggttgtgaagagattttaatggcacgtgtattagtttcccaggncttctgtaacaaagtaccacaggctgggtggcttgaccaacgggaatttattgtctcatcattctagaggctggaagtctgagaccaaggtgtcagcagg

SEQ ID NO: 1056 - DNA, 201 bp, Homo sapiens
  variation 101: note = n = C or T
  source 1..201: mol_type = genomic DNA
gaaaagcatgaataagcagtattggaatgtttacaatttctatgtgaggttcatgagcatgggaaggagaaggagaagattctaagactagtggttcctanagtatgtcctccagaagactggcactatcaacattacgtgataatttgtgaaaaattaaaaattttgagctcctcccagacctactgaatcagaaactca

SEQ ID NO: 1057 - DNA, 201 bp, Homo sapiens
  variation 101: note = n = C or G
  source 1..201: mol_type = genomic DNA
tgtctgtagtctttaaaatactaagactttggttttctcagaagaagtaaaacaaagacagatacataacattaataatttgattagtagacatacaatgnacaggaggattacaatcaaaagagaatttgtaagccagaacaacaaaaacaaaagagaacccattcctttagggagaaaactaaaaggatcatgaagaaa

SEQ ID NO: 1058 - DNA, 201 bp, Homo sapiens
  variation 101: note = n = G or C
  source 1..201: mol_type = genomic DNA
ttgaagtatgttgcttctatacatactttgttgagggtttcatgaagggatgctgaattttatcaaatgctttttccatatctattgagatgatcatgtgntttctgcctctattgagatgatcatatggtttttgtttttaattctgtttaaatggtgaatcacatttattgatttatgtaggttgaaccatccttgcat

SEQ ID NO: 1059 - DNA, 201 bp, Homo sapiens
  variation 101: note = n = C or G
  source 1..201: mol_type = genomic DNA
tagcagtgaccagtatggaggacattagaggagtctctctgaatgctctgcttaacataaaattttaaagaactgcaggaggaggagttgggtggagtganagcccacaatgactgagtgaatttgccttcaacctggcaacatgggtgcaaagtcagatttattttaatttaaagagcacaaagaagaaggatatttctt

SEQ ID NO: 1060 - DNA, 201 bp, Homo sapiens
  variation 101: note = n = T or C
  source 1..201: mol_type = genomic DNA
atggcattgtaagcagcagacactcttggtagcaaagtatgaggagctcaaaaaaactgggatgtgttttgtagagatggagaatggggtaccagttgtgngtgtgtgtgtgtgagagagaggcagggccatgactagagtgaagcaagtgaggcctttgcctagtgccccaaatttaagtagacaacagaagaacaacct

SEQ ID NO: 1061 - DNA, 201 bp, Homo sapiens
  variation 101: note = n = T or C
  source 1..201: mol_type = genomic DNA
gtaatacatttcatttcctttttaacacaacttgaattttatacacactattcagtattttgcatttttcaccttatcgtggaagtcagtcagtttgtctnggtatgtacagagcctccttctttttgacagctgaaactgcatactatttcattcaatggagttaccatttatttataaatcccctattgctggatgttc

SEQ ID NO: 1062 - DNA, 201 bp, Homo sapiens
  variation 101: note = n = C or A
  source 1..201: mol_type = genomic DNA
ttatttatctattgttgtttttgttgcttatgcttttaaggtcttagctatgaactttatgcctagaccaatgtccagaagagtttcccttaggttacttntagtatttttatggtatctgttgttacatttcagtaagtctttaatctatcttgagttgttttctgtatatgctgagagataggggtacagtttcattct

SEQ ID NO: 1063 - DNA, 201 bp, Homo sapiens
  variation 101: note = n = C or T
  source 1..201: mol_type = genomic DNA
caatagaaagaaatgcttgagttaagataagggggcttgtggaggccaaggttcttgttatgtagatgaagccttataggtagcagcctttagagagaatngatggcaaatgtctgtcttcataaattaaaggtgccaggctctccattagtctctcctagatataggtaaaggcctagaaaggaaaggcctggttgcatt

SEQ ID NO: 1064 - DNA, 201 bp, Homo sapiens
  variation 101: note = n = T or C
  source 1..201: mol_type = genomic DNA
tgtgtgtgtatttctgcatgctgttctaatggattgatctgtttgcctcattttcatgtcaatagcacattttaaaaattactgtagctttctgtcctttntcaaaactgtttttactgttctaggtaggtccttcacattccatataaattttaaaatcagctgttaaatttctactgaaaaaagaaagctgattgagat

SEQ ID NO: 1065 - DNA, 201 bp, Homo sapiens
  variation 101: note = n = C or T
  source 1..201: mol_type = genomic DNA
tagcaataacaatctctgtctaggatataagggaaaaaagtctttattataaaagtacttacactgggaaaacattcttaaaagaccagattataaatagngtaggcttcctgagccaggtctggcctttgttgtataactctaatttctttttgtttttaaacaactctttaaaaagataaatatccttaggtattggcc

SEQ ID NO: 1066 - DNA, 201 bp, Homo sapiens
  variation 101: note = n = T or C
  source 1..201: mol_type = genomic DNA
ctatcaccagaatcctttagggctggtactggcttcctgaagttcctagtttggctccatcgtaatgcattttttattttcttagccctctgctcacctcngagaatgatctttttattaaactctcttcagcaaaaccctttgagcctagaatcttgtttattgccagaactttgacagagagtcagagatgaagacagt

SEQ ID NO: 1067 - DNA, 201 bp, Homo sapiens
  variation 101: note = n = G or A
  source 1..201: mol_type = genomic DNA
ttcatacaagtaatatatttgtccaaattggacaaagtacagagaagagtcacaaaaatgattgaggagatggaggccttaacatacgaggtgagattaanagaatgtagtgtgtggagcttcgtgaagctgctgctaaggagatacggtatcactgcctatgcctcagggcatagcagtaaacccccaaaggggaatttg

SEQ ID NO: 1068 - DNA, 201 bp, Homo sapiens
  variation 101: note = n = C or T
  source 1..201: mol_type = genomic DNA
atcttaaggctatgaaatgattctccccccttccacccaacatttcaccaccacatcactgcagacttatttacagctgttcctattacccagtacataangtctggccatcaggaaaaaatatatataaaatacactaaaaggaaaacacagtttgaagggactgaatgagaagcagaataacagatatggcaggaaggt

SEQ ID NO: 1069 - DNA, 201 bp, Homo sapiens
  variation 101: note = n = C or T
  source 1..201: mol_type = genomic DNA
aaggcaattttccttgggccaaagggacatatttgagttaaacagactcaaaacacatactcttccactgaatataatgtggtgacattacttctatagancctacttctatgcttgctttgtttaattgctctgatactaatgacaccttggacaaataacatcattttctgagtcttgacctcctcactttaaaatagg

SEQ ID NO: 1070 - DNA, 201 bp, Homo sapiens
  variation 101: note = n = C or T
  source 1..201: mol_type = genomic DNA
ggaatatagcgagaccctttctctacaacaaataaaaattagctgggcactgtgcacctgtagtcctagctactcaaggggctgagacaaaagcgtttatngagcccagtggcctgagtttgcagtgagatatgatcacaccactgcactccagcctgggcaaaaaagcaagactctgtcaatcaatcaatcagtcagtga

SEQ ID NO: 1071 - DNA, 201 bp, Homo sapiens
  variation 101: note = n = C or T
  source 1..201: mol_type = genomic DNA
agggtactttagatccctagggctgttgaattctaggatgcaaaagagagagtatgcagaactgagcctggagctcagtgcttactttattgagtgcttantatatgccaggcactgtgctaccttaaagatattagtccttataacaaatcataaggcagatactgttattgatcccactttacatatggagaaactgag

SEQ ID NO: 1072 - DNA, 201 bp, Homo sapiens
  variation 101: note = n = T or G
  source 1..201: mol_type = genomic DNA
atatttatatacatatgtcagatatgtatagatatataacaattcatgtgtgtgtgtgtgtgtgtgtgtgtgtgtgtgtgtataaagagatttgtcatgcnattatggaagttaaatctcatgatgtttcctctgcaagcttgagaccctggaaagccagtgggtacaattcagtctgagaccaaagacctgagaaccagc

SEQ ID NO: 1073 - DNA, 201 bp, Homo sapiens
  variation 101: note = n = A or G
  source 1..201: mol_type = genomic DNA
cattgcatacctgtaagaaatggccttgatttatttcaacagggaaaaagaagcaaacaaatggaatggttcatcttgataccattaaatctcttactctnactgtacccggaaaccatggttttccacttgttagaatggaataacggccctgcctatctacggccaagctctccagttctgcagtgaatcaaaacagtt

SEQ ID NO: 1074 - DNA, 201 bp, Homo sapiens
  variation 101: note = n = G or A
  source 1..201: mol_type = genomic DNA
agagacagtgtaacaactggctgaccatcgcctgatggtcagctgacattcctggtgtggtggggtggggccctctccctgccctgctcatgcctgactanctgcctactgtaccgaatatactactttgtttattcattcatttaatggtgggcatttggattgtttaaagtttagaattattacaaacaaagctactat

SEQ ID NO: 1075 - DNA, 201 bp, Homo sapiens
  variation 101: note = n = A or G
  source 1..201: mol_type = genomic DNA
tcccaaaacaataaataaatggtttttaatgtgcaaaaacatgcacaaataggcaaaaattcaaataatagcacatcatttttcactgattaagatattcnaacattttaaagtgttcaaaattttatagcccttggagaaggtacaaaaaagctgtgcaccaatgtcctgttggtgtgaaatgtgagaaaggcgtacaac

SEQ ID NO: 1076 - DNA, 201 bp, Homo sapiens
  variation 101: note = n = A or C
  source 1..201: mol_type = genomic DNA
agatatttagaatttgatgtctacttataaatatctcccggattagcatttgatcttcccagagatgaagaataatgatttatcccaaagagaagctatcntagaggaaatttcaagtatattggtaatctggggtttgcagcgtctctgaaaacacaccatatgctatccacctcttctagttaatattctttctgatca

SEQ ID NO: 1077 - DNA, 201 bp, Homo sapiens
  variation 101: note = n = C or T
  source 1..201: mol_type = genomic DNA
tttttcatcagaggctacctgacctggaggaagagaaataaccaggccagctcctttagttcaccctgtccttcctaagaaggcaaagactgagaagcacnggtgaagcacacagtccaggggcacaagctcaccaaaaagctgacacctaatcacaaaaccacagaacacttctgatgcagtttggctctgtgtccacac

SEQ ID NO: 1078 - DNA, 201 bp, Homo sapiens
  variation 101: note = n = G or A
  source 1..201: mol_type = genomic DNA
gtctgggaaactgctttgtgatgagagcattcatctcactgagttaatcctttcttttgattgagcagtgtggaaacactgtttttgaagaatctacgaanagatgtttgggggaacattgaggcctatagtgaaaaaggaaatatcctcagataaaaactagaaagaagctttctcagaaatggctttatgatgtgtgca

SEQ ID NO: 1079 - DNA, 201 bp, Homo sapiens
  variation 101: note = n = C or G
  source 1..201: mol_type = genomic DNA
agtggagactctctgtaggggctcccatgccacatttcccctctgcattgccctaatagagtttttccatgagggctttgcccctgcagtacacttctgtntggacatccagacatttccatacatcctctgaaatctaggcagaggctcccaaagctcatctcttgtcttctgtgcacccacatgcccaacaccacaagg

SEQ ID NO: 1080 - DNA, 201 bp, Homo sapiens
  variation 101: note = n = A or G
  source 1..201: mol_type = genomic DNA
ggaaagagtttttcaaaaggatatgaaattattaagcataaagtaaaagattataaaatttgctttgctaaaattaagattaaaaaaattaaaagacaccntaagaaaaatgaaaagtcaagccacagaatgggaagaaaaacttgcaaaacatatagctaacaaagaattaatacccaatctatgttaaaaaaataaaaa

SEQ ID NO: 1081 - DNA, 201 bp, Homo sapiens
  variation 101: note = n = T or C
  source 1..201: mol_type = genomic DNA
tggtccattaggaacactcactcattccttgaagaaactcttgacacaagggctaatctagcctgccagtttctctccccatctgaagaattagctggcangattcagggacagctcactgtgtcccacaaggtctagagggcacacttcaatctctgcaggtggtcctgtgaaagcccatctcagttaggtgcaaggtga

SEQ ID NO: 1082 - DNA, 201 bp, Homo sapiens
  variation 101: note = n = A or G
  source 1..201: mol_type = genomic DNA
atgaattatctttcaacaatttagattctatcacatcactcgcctgatttaaaattcactctgtatggtagcgattctcaaatcacatggaaagcttgttnacacacacgttagccgacccacctcccaactctcagattcagtagatctagggtgaagcctgagaatgtgcattttgagtgtattcacaagtgctgctgc

SEQ ID NO: 1083 - DNA, 201 bp, Homo sapiens
  variation 101: note = n = A or G
  source 1..201: mol_type = genomic DNA
ttcaagtaaatgttctattggcttagagttgctcataatattactttataaactgtttgatatctgcttggtctataaggactgatccattttatccatgnaattgattacctgcaccttctttctttgaccagtctcactgtctatcaatttattcattttgaaaaaaacaccatttggatttgttgatcttctctgtgt

SEQ ID NO: 1084 - DNA, 201 bp, Homo sapiens
  variation 101: note = n = C or T
  source 1..201: mol_type = genomic DNA
gacaccagctatggtggcagcaggccccaggtagggtggtttcaagctcttaggaagtgcacgtgggtgccagtggtggtggcaatgggccctacatgggntgatcttcaggctcctgaacagtgtgcatagccactgatgttggcaaattgggctacaggcaggctgatctgtaggatatgtgcaagcactgctgctgtc

SEQ ID NO: 1085 - DNA, 201 bp, Homo sapiens
  variation 101: note = n = C or T
  source 1..201: mol_type = genomic DNA
taaacatcctggttgccccacccatatcaagaaccagtgcatggccagcatctggaagccccctgggtggtctttcttcatcataaagtcctccctacccnccatgttaaccatactactaaatattctgaaattcacttttttttacagtgtcactatctaattgtagatctcaaaacaccatggcttagtctgttgcct

SEQ ID NO: 1086 - DNA, 201 bp, Homo sapiens
  variation 101: note = n = G or T
  source 1..201: mol_type = genomic DNA
tactactaaatattctgaaattcacttttttttacagtgtcactatctaattgtagatctcaaaacaccatggcttagtctgttgcctgtttttgaaattngtatattgaatcatacagtaactttaaagtctggcttcttttactttatattgtaaaggtttattcaccttttgcatgtaactgcatatattgaagtcta

SEQ ID NO: 1087 - DNA, 201 bp, Homo sapiens
  variation 101: note = n = C or T
  source 1..201: mol_type = genomic DNA
gatcatacctaagctgatttgatgaatggaaaatatggaagaaaggtacattcccaggtaaagggacaacacagggaaaggcacaaaaatatgaaatagcntggcgtgtaggaaactagttctcaaatgtgttggcagaagagatggccagaagtgcatcttggaggctcttaaatatcacaacaagaaaccttaccttta

SEQ ID NO: 1088 - DNA, 201 bp, Homo sapiens
  variation 101: note = n = G or A
  source 1..201: mol_type = genomic DNA
ggaaagaaagcctcactgaagagaattaaggggagagcaagagattaagaaatgaagacagcaagaattgaccactctatttaagaaaatggaattttttnagatggaagatatttcagtatgtttgtatgctcctgtaagtaatctagtgtagggggcaagagtttatgttgaggaaaatataaccatagttgtaattca

SEQ ID NO: 1089 - DNA, 201 bp, Homo sapiens
  variation 101: note = n = G or A
  source 1..201: mol_type = genomic DNA
catatataagcaatatatatgtaatatatatgtgtgtgtgtgtgtgtgtgtgtgtgtatatatatatacctcattttacctacctttatacctgtgccacnctgcattaattgtaactttataataaatctgtatatcaggtagaacaagcttatatcttggtcattttcagtcatgctatagttatttctggccatttgg

SEQ ID NO: 1090 - DNA, 201 bp, Homo sapiens
  variation 101: note = n = A or G
  source 1..201: mol_type = genomic DNA
ctatcttctccatcacatctacccctatagttcaagggagagtatctcttccctggattattgcaatagcttctcatcttgcctcatttctacccggtacntctccctgcagtatatcttctatgaagaaatcagaggaaccctttaaacatgtaagtcagaccaggtaattcctatgttcaaaatctgcagttgattccc

SEQ ID NO: 1091 - DNA, 201 bp, Homo sapiens
  variation 101: note = n = T or G
  source 1..201: mol_type = genomic DNA
tacaggtctttggaatcagggccaccgctccttgatgacttttggcaagaggtcactctcaatttcttccacatggacctctccacatctgtatggcagcntacttcatcaaagccagcaaggggagttctactgagaaagcctagcagcaagaccaaagttacaatcttacataacgttaccaccgaagtggcattccct

SEQ ID NO: 1092 - DNA, 201 bp, Homo sapiens
  variation 101: note = n = G or C
  source 1..201: mol_type = genomic DNA
ctccagcattccagtctccctgagtctttaaatcttttcttctaccttaagccaagggacacgggacatttccaactaactcacagtaggccattgttgantcatttttcaactgacaaaacaaactattagagccttttctaacaccccaggctgcaacattaaatgcagaatctgtgcttagtgggcctatattaattt

SEQ ID NO: 1093 - DNA, 201 bp, Homo sapiens
  variation 101: note = n = C or T
  source 1..201: mol_type = genomic DNA
ccatttgtatatcttctttggaaaatgtctattcaaattcttgactcattttttaagtgaattattcgtcttcttattgtgaagttataaaatttcttganacattctgaatacaagagaatattgtttgcaatattatcagaattgcaaacattttctcccattctttgaattgccttttaacttttcttaatgttgccc

SEQ ID NO: 1094 - DNA, 201 bp, Homo sapiens
  variation 101: note = n = T or C
  source 1..201: mol_type = genomic DNA
actaactatagaacagaggtaagttcctccagctctgtgggcttcttttcattcatccataaaataatggaaatacaccaactgtacctacctcaaagttnttatgtgaacataaaaccattaaagcaaatgacgggtggttgctgagcctgacacactaaattctcaataaaccatagttacccttgatagtattgctgt

SEQ ID NO: 1095 - DNA, 201 bp, Homo sapiens
  variation 101: note = n = G or A
  source 1..201: mol_type = genomic DNA
ggaaggaaggaaggaaggaaggaaaatgacccctgcatgatttcattaatataaaattcaagtaaatgcaaatgaatcttcaatgacagaaagcaggtcantagttgtctggggattactaaggatttgaagaatatctgaggggtggtaaatatgttatcttggttgtggtgatgttttttctggtgtacacataagtcg

SEQ ID NO: 1096 - DNA, 201 bp, Homo sapiens
  variation 101: note = n = C or A
  source 1..201: mol_type = genomic DNA
ttcaatttccttactcagcattgcactgttcaggtttctgaattttgtgattcgctcttaataggttatttgcttctgggaatttgcctatttcctccagnttgtcaattttttgacatataattgttcttagtctcacatgactcttcatatttctgtgttacctgttgtaatgtctcttttctcatttctggttttatt

SEQ ID NO: 1097 - DNA, 201 bp, Homo sapiens
  variation 101: note = n = C or G
  source 1..201: mol_type = genomic DNA
ggtattgcctaggttgtctttcagggtttttatagttttgggttttgcatgtaagtctttaatccatcttgagttgatttttgtatattgtgtaaggaaanagtccagcctcaatcttctgcatatggctagccagttatctcagtaccatttattgaataaggagttttttccccattgcttgtttttagcagctttggc

SEQ ID NO: 1098 - DNA, 201 bp, Homo sapiens
  variation 101: note = n = C or T
  source 1..201: mol_type = genomic DNA
tttttcttttttctattttctcttaagatcaactgtacaacactgtcatataaaagtccctcttctagttagcccaccttccatgccaaaaacctctaatnggagtatcactgaagcctttatttcttttcattataaagctttcccatttatctgtctgtctctgagattttgtcaaatgcaaaaaaaaggatgccttga

SEQ ID NO: 1099 - DNA, 201 bp, Homo sapiens
  variation 101: note = n = T or G
  source 1..201: mol_type = genomic DNA
aaagacttttccctgtagatgtgtcctatactgtcagatgggtaggatactttggctttgattctagatggtcaatacagtgtagtttctatgtgatttcnccagctataatcagcttcagcagtgtctgaaaattcttcagtggcctaggctgtggttggttgtgaagactatgaagctttgcttaggatgggagcactg

SEQ ID NO: 1100 - DNA, 201 bp, Homo sapiens
  variation 101: note = n = T or C
  source 1..201: mol_type = genomic DNA
gactggtctggtagtgacaaattagctcagcatgtacttgtctgaaaaagactttattctccttcatttatgaaacttagtttggctggatataaaattantggctgggacagaggtggagcatatggcagaatacaagactccagtgattgcccccaccctctgccacaaggacaccaatttaattatctacacacacac

SEQ ID NO: 1101 - DNA, 201 bp, Homo sapiens
  variation 101: note = n = G or A
  source 1..201: mol_type = genomic DNA
tgtaagtggaaaactggcatttgaatgcagatctgtctagcttcagaatgcaactttttcctccattaaaacccttgtttattaaagtaaagagtacttgncaagcagtaggtaaaagtccccattttgctactgattagatgattttaggtgaattaacctctttgagcttcagatttctcatctgtaaaatagagataa

SEQ ID NO: 1102 - DNA, 201 bp, Homo sapiens
  variation 101: note = n = G or A
  source 1..201: mol_type = genomic DNA
ttatgtgacaaaggtgaaaggattttacaaatgcaattaaaattcttaatcatttgactttgaagtaatcaaagaaagatatcctgggtgggcctgacctngacctaatcagagaaacactgaaataaggtcctagaagcctaagaaaatttccagccgtcttgaaagaaactagtccctgtgattttgacagtcatgagg

SEQ ID NO: 1103 - DNA, 201 bp, Homo sapiens
  variation 101: note = n = T or G
  source 1..201: mol_type = genomic DNA
agcttcagttcaaatgttgtttttccatggagaccttgctaaagcaaagcttaccaatctcctccttctgctccaacagtacctgaatttttattcacctnccatgcagctttactccttcagtacatttttcattgtgtgaaattacctgatttgtgtatttgtttattttctgtcttcctgtctataatatagactccc

SEQ ID NO: 1104 - DNA, 201 bp, Homo sapiens
  variation 101: note = n = T or G
  source 1..201: mol_type = genomic DNA
atactatttatccattaaagaaaatgaaacatgattctaatttctgtctctattattttgactgttctaggtaccttacataagtggaatcatatagcatntgtgtttttgcgactggcatcttttacttggcataacggttttgttactgaaacacaagcagtttggcctaggtccattgctcatcacacagaaagtcaa

SEQ ID NO: 1105 - DNA, 201 bp, Homo sapiens
  variation 101: note = n = A or G
  source 1..201: mol_type = genomic DNA
gaggaggagagagccatggtttatgcaccagcccaggtctgctcagagaatgagaaccactagggaatacgcatcatgaggactgcaccctacacagtggnccagctagtcacttagtctaggcaaggctgttgtttccatgcctggtgctagagcccaaaggccacagggcatgcagctgggaaaggagactgtacatga

SEQ ID NO: 1106 - DNA, 201 bp, Homo sapiens
  variation 101: note = n = G or A
  source 1..201: mol_type = genomic DNA
ccaagctgtctgtccttgggtcatgacttggccaccctaacccttggtttcctcacctgcataaagaaaatgatgattgatctccctccacaggcttgggntgagttggaatgtggtcaaagttaaggtttttatggaatgtctggtgtatttttcatctcaattaacattggctgccatgctcctcattgccacttcaaa

SEQ ID NO: 1107 - DNA, 201 bp, Homo sapiens
  variation 101: note = n = T or C
  source 1..201: mol_type = genomic DNA
gtggcttctgtcctgagttctctcttttgaattactcactttggggcagacaagctgccatatcatgaggacactcaggtggtctatggagaagctcaccnggaggaaaagaagttttcagtcaacagccagcaaggaactaaagccttccaacaaccccatgagtgggtttagaagcaaattctactagttaagcctgag

SEQ ID NO: 1108 - DNA, 201 bp, Homo sapiens
  variation 101: note = n = G or C
  source 1..201: mol_type = genomic DNA
ggcatagtgtgcagggcccccgaggttgccatttgccccagtgaggggacttggaggtgctgcaagtcctagtgcctcagcagaagcctggggtccttaangatgggggaaacttagaaaccagattcaaaaggtgagagccaatgtctgtagcagtgataccaacacatcaaaccatgtggacacctcattggttccact

SEQ ID NO: 1109 - DNA, 201 bp, Homo sapiens
  variation 101: note = n = T or C
  source 1..201: mol_type = genomic DNA
agatctgaggctagttgagggaagatggtgagagctagacttcatagaatatgcagattttcccaaaagccagaatcactagggaagaaatgacatcaacntcccataaacgcttccagagatttttcaaaataatgagtacttcgtaactcattttataaggtcagcataatgttgatatcaaaacctgataagggacat

SEQ ID NO: 1110 - DNA, 201 bp, Homo sapiens
  variation 101: note = n = G or A
  source 1..201: mol_type = genomic DNA
aagagaaaagaaagagcactgcggcccctcttcctttcaccttgcctcccttttcctcatcactgcccaacaccacattgcacatattctttgtgaatccnttcattgtctgcctaagacagaaacgtaagctccatgaggagagggacttgcctctgttttgttcactgctctgtcttcggcgcccagtacagagtagag

SEQ ID NO: 1111 - DNA, 201 bp, Homo sapiens
  variation 101: note = n = T or G
  source 1..201: mol_type = genomic DNA
taaacacacaggaagcattgtcagatataaaatggtgtttggctttctttggtctaaaaactaaaaaataggtgctaaaggaaatttctcagtaagaaggnaccgaggactataaagtccactgctgatgtccccacatttaaaacaaaaggtcaatttcttagaaattatatactttatcttccactttcctttccctca

SEQ ID NO: 1112 - DNA, 201 bp, Homo sapiens
  variation 101: note = n = C or T
  source 1..201: mol_type = genomic DNA
agaatgattgcaaacaacactcaccaatcatttgtctccacaagaagaccctcttagtcattccttactgttcctattcattaattcctttgagaagggcnattgcttgtgagctttggttgaaaagctcagcatttttcctgagaggaattctacgttaccccattagctggagcaaagtggaagtgaggtcatcctgga

SEQ ID NO: 1113 - DNA, 201 bp, Homo sapiens
  variation 101: note = n = A or G
  source 1..201: mol_type = genomic DNA
actctttagtacattactgtattagcccattttcatactgctataacaaactacctgaaactgggtaatttataaatagaagaggtttaattgtctcaccnttacacatggctagggaaacctcagaaaacttataatcatggtggaaggcaatggagaaacaagcactttcttcacaaggcagcaggagagatgagggaa

SEQ ID NO: 1114 - DNA, 201 bp, Homo sapiens
  variation 101: note = n = G or T
  source 1..201: mol_type = genomic DNA
ttcattacagcttttggaacctttgttttcttctttttcttttttgtgattatatttaaataattttattgtcaaattttcaattttgtttacctttcctnagctgttttatgggttggccatttaagtaaatttttcactgctattaccttttcctttctattattttaatttaaatctttgttctagttttcatctctg

SEQ ID NO: 1115 - DNA, 201 bp, Homo sapiens
  variation 101: note = n = G or A
  source 1..201: mol_type = genomic DNA
tgattgattctgcttcacctagattgctacctttctgccagaatccattacggtatcagacatggcagcacactaactatcatagggtacacattaaaaangattagagacgctatcattgcatgcgaaatttgtcactcctactaaaagttgagattttgtattataatgagggaagtcatattgcatgtttacccttca

SEQ ID NO: 1116 - DNA, 201 bp, Homo sapiens
  variation 101: note = n = G or A
  source 1..201: mol_type = genomic DNA
ttctaaaaagcagctgctagatacatccctgtgaatttttaagggttgacaaaaattagtcctcacctccaaatgctccaaagagcctatgcaaagagcanaacagaaattcagaaattcagggagggtcattcagatttagaattaccgggtcttagaaatactttgacttttcgtttcttcatggggttgggtagaggt

SEQ ID NO: 1117 - DNA, 201 bp, Homo sapiens
  variation 101: note = n = T or C
  source 1..201: mol_type = genomic DNA
gagcatatatattttctgtaaatgagcatacaattaacaagtataactgcatattgtctttattaactgcaagcatttattaagtgtcttctgtgtgcaanaaatggggcaatactttggaatactaagaatgaaaaaacaacaaacaaatgaatgaaaaactcagttgatattaagtaatttaatggccaatgccctcag

SEQ ID NO: 1118 - DNA, 201 bp, Homo sapiens
  variation 101: note = n = G or C
  source 1..201: mol_type = genomic DNA
atgcaagtaaatctaaacaagtcttgattgttaaaaaccattaacattaatatctattgggcttataatatacagagaaatttaaaaaaatcatgtaaaangtaggaggggctaggtagagttagagtgacctaaagtctagtgttctctgggaagtggtgaaagaaataatttgatcttattatagtaagccaaggatgc

SEQ ID NO: 1119 - DNA, 201 bp, Homo sapiens
  variation 101: note = n = C or T
  source 1..201: mol_type = genomic DNA
cagcccagagcaagtttctccaaaacatctaacaattttggaagtacctcattcttagtactaaatctctttggttcacaatagtcacattgttttctgtnatctgcagttgaacattgactaacacacacatacttgataatttttctcttcttgtgacttgttgcttcaccacaacatttttccttgagtgtttacttt

SEQ ID NO: 1120 - DNA, 201 bp, Homo sapiens
  variation 101: note = n = G or A
  source 1..201: mol_type = genomic DNA
acaagttttgacatatgtgcttacccaggaaaccgccacctcagtcaagataatgaacatttccttcaccccgaaagtttcatagttgccccctttgtaanacctccttctttttgccccatccccagtctgctttctgtgactatagattactctgcggtttctaggattttatgaaaatgaaatcatcttttcttgtct

SEQ ID NO: 1121 - DNA, 201 bp, Homo sapiens
  variation 101: note = n = T or C
  source 1..201: mol_type = genomic DNA
ttgatcatcagtaggctattagtagtttttagtgagtcaaaagttacaggcaggggaagaagcagagcaaggtagtggaatagaagcctccagcactcacncacctgaaggaataccaaattgaacaactatccacacgaaaaagcacctacataagaacaaaaaaatcaggtaacagtacctggttttaacatattaagg

SEQ ID NO: 1122 - DNA, 201 bp, Homo sapiens
  variation 101: note = n = T or C
  source 1..201: mol_type = genomic DNA
ttaaatctgtacctgttacgcctgtgtatctccttgccatttctatgttctgatttgtattttggtgccagatttctctgaggactttcttattttccctnttatcagcatgtacctagctatattctgaggggttaactgcagaatgaatgattactaggcatcttaatggacgtttcattttgcctgagtacctcctct

SEQ ID NO: 1123 - DNA, 201 bp, Homo sapiens
  variation 101: note = n = T or C
  source 1..201: mol_type = genomic DNA
aagatggaggcagatatcagagtgatgaagccacaagccaagtaatgccaggcagtgccaagcagctacccaaaagttggaagaaacaaagaaaagaaccnagatactctggaggaaatgtaatgctgctgagacattgatttcagatttctggcttttataacttgggagaatacatttctgtgggtttttttcttgttg

SEQ ID NO: 1124 - DNA, 201 bp, Homo sapiens
  variation 101: note = n = A or G
  source 1..201: mol_type = genomic DNA
ttagattttaggcacttaaaagctgattttatctatcagtatcgagtatccatgcaataccaaaaagtctttatgcccttcacatagattagctcacaatngccctatgaataaagaactattacccccattttatatataagaatgctgaaaaacaaagaggtacaacatacttgccaaggacacacagcagctagatat

SEQ ID NO: 1125 - DNA, 201 bp, Homo sapiens
  variation 101: note = n = T or C
  source 1..201: mol_type = genomic DNA
aaaataactgagaaagtcaaatagaatatatatgtgtgtgtgtgtgtgtgtgtgtgtgtgtgtatgtatacacatacatatataagtctgtgtgtaggcantgggaaattgtgtaggtaaccaaaatgtgagggtgaagatcccaggaaaaaatgcaggtcattaagataagctcaacttctccatacttctcttcctctt

SEQ ID NO: 1126 - DNA, 201 bp, Homo sapiens
  variation 101: note = n = A or G
  source 1..201: mol_type = genomic DNA
tatgaagcagtagttttaaactctgcctatattttagaatcacaggggtaaaggaatgtgagaaaggctttaaaaaggaatttcaggatcccagcctcggngattatgatttcactggtctaattagagcctaagatttaggatttttatttggttttgtcttaatttatcaaagtatttctaatatgcagcaaggtttga

SEQ ID NO: 1127 - DNA, 201 bp, Homo sapiens
  variation 101: note = n = A or G
  source 1..201: mol_type = genomic DNA
tgctgtgcagaagctttttagtttaatatagtcccacttgtttattttttgttttgttgcctacttctgatgtcttggttatgaattctttgcctagaccnatatccagaagagttttctctagggtttcttccggtatttttattgtttccagtcttacatgtaagtctttaatccatcttgagttgattttgtatatgg

SEQ ID NO: 1128 - DNA, 201 bp, Homo sapiens
  variation 101: note = n = C or T
  source 1..201: mol_type = genomic DNA
tatgtaatagcacttatttctcaaaacaatgcagcctaatcatgagaacaacagcagacaaatcccaattgggaacattacgcaaggtatctgacctatantcctcaatactatcatcgtcagaaacagggaaagtcctaggaactgtcacagtggaggaaagcctaaggaagcatgaaaactaaatttaatccagtattg

SEQ ID NO: 1129 - DNA, 201 bp, Homo sapiens
  variation 101: note = n = A or G
  source 1..201: mol_type = genomic DNA
atagccacagagaagaaagagagtgaaacggtttggctgtatctccacccaaatctcaccttgagttataataatccccacatgtcaatgtgggataatgntaattgaatcatggggatggttcccccatactgttctcgtgatggtgaataagtctcatgaggtctaatggttttctgaatgggaattcccctacacaag

SEQ ID NO: 1130 - DNA, 201 bp, Homo sapiens
  variation 101: note = n = A or T
  source 1..201: mol_type = genomic DNA
ccttaatattactcaactttatattattttcattttactcatttggcaaaaattcaacccttccttgttaagacaaaacttcatcccatttctggcctatntgcagtccttacagtgacctgcaatgccctacatggtctgacctgctttccattgtcaccaactgatatgaaaaaagctaactatgtatgactaaagaag

SEQ ID NO: 1131 - DNA, 201 bp, Homo sapiens
  variation 101: note = n = T or G
  source 1..201: mol_type = genomic DNA
tgccagcaattacatagtcgttgttggtttcctcaagttgtctgagccggatggcaatcatttgatgttcaattggctgctggggagcatttaaaaccctngggagcatacgatacaccaggggtaaacccaatagccatacagagaataatagccgaggactgaaaaacttcctctgagcaaagatttctgggagtcaag

SEQ ID NO: 1132 - DNA, 201 bp, Homo sapiens
  variation 101: note = n = C or G
  source 1..201: mol_type = genomic DNA
accccttccctttccatcccagagtttccaattcattaggtcactaatggagcccagggatctgtattttcaactgcttcccaggcaattccaatgatcanccaggtttcaaaaccctaggcctacagcacaaatgataaatgataacatttaggttctgtctctcatttctcctgctattggccccacactgaatttagt

SEQ ID NO: 1133 - DNA, 201 bp, Homo sapiens
  variation 101: note = n = A or G
  source 1..201: mol_type = genomic DNA
aatgaagtccaatttgtcaatgtttttctctcatagataaggcttttgttattatatctgaaaagtgattggcaaaaccatggtgacctaggtttctccantgttatcttcgaggagtcttatagttttgtgttttacacttaggtctatgatccattttaagttaattttgtgaaagatataagatctatttttttttct

SEQ ID NO: 1134 - DNA, 201 bp, Homo sapiens
  variation 101: note = n = G or C
  source 1..201: mol_type = genomic DNA
cagaaataatagtagtgagcaccacatttggtgatcaggtagagtactaggtcttatgcagtatgtgccacagttgtccacatcattgacttttcacaatnagtagtaatacagtaggaactagcagtatccctgttttacagatgtggacacagaggctcagaacatttaagtaacttgtcaaagaacaaaaagtgagga

SEQ ID NO: 1135 - DNA, 201 bp, Homo sapiens
  variation 101: note = n = T or A
  source 1..201: mol_type = genomic DNA
ctctcccgctctaatgcaagattcgcaaagccaggactgtatctgcttgtttgctgctctatctcccatgcctggcacacaccaaaactcaataggtagtnattgaatcaatgaataaatgattttaataaataaatgagtaaaagacgccagagtgaagtcccagcccttgggagcagaaggtaagaaaggtaaaagcag

SEQ ID NO: 1136 - DNA, 201 bp, Homo sapiens
  variation 101: note = n = T or C
  source 1..201: mol_type = genomic DNA
gcctcacaactactctgtgtgtaaagaatgacaattgctccccttttaaagatgaggacactgagggttaaaaaagctagggaacttttgttggtttgcanagctagaaagaggccttccctgacccccttgaagaggtaacctgcggttccctcagttgctagccacgttgctctattttcttaacatcaccaatcacag

SEQ ID NO: 1137 - DNA, 201 bp, Homo sapiens
  variation 101: note = n = T or C
  source 1..201: mol_type = genomic DNA
acttggggggaagggagggagggggatgaaggataaaaggctacacatggggaaagtgtacactgctggggtgacgggtgcaccaaaatctcagaaatcangactaaagaggttattcatgtaacaaaaaaccacctgtaccccaaaactattaaaaaatgtggacactagaaaattaaaagttacatatattgcttgcat

SEQ ID NO: 1138 - DNA, 201 bp, Homo sapiens
  variation 101: note = n = C or T
  source 1..201: mol_type = genomic DNA
tttttgtttgtttgtttgtttagcattttggacatatcatcccattctctcctggtctgtaagagttctgtcaagaaatcctgttagtctgatgggaatcncctgattcatggcttgatactttttccgtttttggaagtctctctttgtctttgacttttgacagtttaagtataatgtgccctgaagaagaccttttgg

SEQ ID NO: 1139 - DNA, 201 bp, Homo sapiens
  variation 101: note = n = A or G
  source 1..201: mol_type = genomic DNA
gatagcttaaaacaaatagcactatgatgcctaccttctcacagtttatagcctaagtgagcaggacctttgtctgattcatttttgttttgttattagantaatgcctggcatatagtaaatgtttcataaattattgtcattatatattcatcgactattttttgagcaccattttgtgtctatccttgggttggataa

SEQ ID NO: 1140 - DNA, 201 bp, Homo sapiens
  variation 101: note = n = A or C
  source 1..201: mol_type = genomic DNA
aaatttcccattctttttgggttgatttttgtatacagtgagaaataagggtctatattattcttcttcatgtttaagcattttaaagccctccatggacntcttttttccccgatattttgttgtgagtttttggccaaacttttgtttgtctcaattgatatatcatacagctgcattttaaacaattgccactgattg

SEQ ID NO: 1141 - DNA, 201 bp, Homo sapiens
  variation 101: note = n = A or G
  source 1..201: mol_type = genomic DNA
cttccagtaatgaagccagtcaattaagacctccttattccacagtcaaatcaccagggtcatcaaataaaattaaaaataatccaaaggacagcaacttnaaggattagaggaacatcagctcacaaagatgagaaagaaccagtgcaagaactctaacaactcaaaaaccccaagtgtcttcttttccccaaatgacca

SEQ ID NO: 1142 - DNA, 201 bp, Homo sapiens
  variation 101: note = n = T or C
  source 1..201: mol_type = genomic DNA
aaaatcttcacagaagccagtggtggtgggggaagaaacatctcatatatagaggattaaagataaaaataatatcaaacttattcgcaaaaagtatgtangcaaagagagactagtgcattatttaaaaaagtgttgatagaacaaaaccactggcctagaattctgtactatgcaaaattatctatcaaagtggaagga

SEQ ID NO: 1143 - DNA, 201 bp, Homo sapiens
  variation 101: note = n = A or G
  source 1..201: mol_type = genomic DNA
tcttttcagaaggaagggagaaagccaccatacctccccttcaggaaattcatcccagttacactcttgaccccatgttccagctactcagattagacaancacctctttatctgcttcatgtagacagggatggtgactctacgtcttgtgcaagccaagcctgaatcaagggcgctcctactgtggggatgcatcctgc

SEQ ID NO: 1144 - DNA, 201 bp, Homo sapiens
  variation 101: note = n = G or C
  source 1..201: mol_type = genomic DNA
gacttttcaccaggacccaaagcaagctgcgtcatctggctttcttctacctttccaactgtcactctatcactctcctggctcactgggctcaagccaanctatgtcttccttctattcctcaaacaagtcaagcccttttacacctcttggcctttgtgcttacatccctttgcctggcatgccctttcttatagtctt

SEQ ID NO: 1145 - DNA, 201 bp, Homo sapiens
  variation 101: note = n = A or G
  source 1..201: mol_type = genomic DNA
gctgttagctgctctatctgtaggaaccctgcattatggtaatgacattattataagagagttggtgcccagatgagaaaatcataattactagtggagcnaagcatggtttaatgagctccaccttgtagcaaaggtctggagtctgtaatgcaaaaccaagaatgaggtcttgagggaaatcatttatgttataaacaa

SEQ ID NO: 1146 - DNA, 201 bp, Homo sapiens
  variation 101: note = n = C or G
  source 1..201: mol_type = genomic DNA
ctgccagggtaaccaccgttctgacgtgcaacagtgtggattagttttgcctgtttttaccatttaaatctggagtcatacagtgtgcagttgtgtgtctnttttatgcaatgtttgtgagagttatcaatattgcaagttcttgtcgatattttcattgctgtatagtattctgttacatacaatgtgactataacactg

SEQ ID NO: 1147 - DNA, 201 bp, Homo sapiens
  variation 101: note = n = A or G
  source 1..201: mol_type = genomic DNA
agcaacctaacaacgaagggtaatgcggctttcagttaaaggtaatctacccagtgaaatatagtgaatccattaaaatgaggactatgaagactgcacancaacacaaataaagcaacatagaacagtacctgtgagctgtgattgcaagtgagaaaaagtatgctgggggaaatataccccgggggaatatgttaagat

SEQ ID NO: 1148 - DNA, 201 bp, Homo sapiens
  variation 101: note = n = A or G
  source 1..201: mol_type = genomic DNA
ataaaaaaccaaattaaaagcctttctgtcactgttagatcggtcatggtgcctcccttgtagggaatagtgtcagatctttaatttgtaaacagaagatnttgaaggtgttctgtctcctcagaatattcttgagtattatgttacttgaatattatgttactttagtattaatgtgaagtctctggatcattaggcttc

SEQ ID NO: 1149 - DNA, 201 bp, Homo sapiens
  variation 101: note = n = A or C
  source 1..201: mol_type = genomic DNA
tatgtctgcagctcgattttacaggcttcttttgttagaaaagaaatgatttggggggctgcttttcattaaaaggaaaaccttcctaaggacttccttancctcattgtctgcctaaataatttctttttaactcctttatcatttaaccctctggagtggtaactctgctattagggggttttggacgatgactctttc

SEQ ID NO: 1150 - DNA, 201 bp, Homo sapiens
  variation 101: note = n = G or A
  source 1..201: mol_type = genomic DNA
ttaaacacaagttccaatttcaaaccatggctttgtgaatgcataaagctgaatgctttcagaataatccaggtcactccttgaatgctttgtggcttagnaattttttctatcagataccctgaatcatctctctcaagttcaaagttccacagatctctggggcagggaaaaaatgtctacagtctctttgctaaagca

SEQ ID NO: 1151 - DNA, 201 bp, Homo sapiens
  variation 101: note = n = A or G
  source 1..201: mol_type = genomic DNA
ttcaactggaccacagtattggtggtagatttagaagaaatgaatagattccagacagacatttagcaagtaaaagaaaggagtggcagacaaattttagnatgatgtaggaggatggcatcaataattatttttagaattctggattttcagctttcaatatctgtcaaatagtccaccattaaaatgtacacaacagta

SEQ ID NO: 1152 - DNA, 201 bp, Homo sapiens
  variation 101: note = n = C or A
  source 1..201: mol_type = genomic DNA
gcatgtattgtagtagctgcggtaaggttgtagcacaatacgttatacatgtgtttgtggtggtgcatatgtaaacaaacctactgagctgccagtcatanaaaaggttagcgcatataattatgtataaaacataatactggataatgataataagtgactatgttactggcttatgtatttactatgctttacttttta

SEQ ID NO: 1153 - DNA, 201 bp, Homo sapiens
  variation 101: note = n = A or C
  source 1..201: mol_type = genomic DNA
ctcttccattaaaatgagggcactaattgggaagaaatgggatccggaaaagtggaatggaaacatatgaaaagatcttgataaatctggggaccttcaancataaaattctgtggacctcctttagtagcagaagtagcccttccattctgcctaaggagctcagccgtcattagcctaaagatctgtaatagcctccct

SEQ ID NO: 1154 - DNA, 201 bp, Homo sapiens
  variation 101: note = n = C or T
  source 1..201: mol_type = genomic DNA
tttattttaaggctcttgactcttacagtgagtggtcagccattccaggactcagctatccatgattataaaacccattagtcgtaaaatgcattgctaanaaatatttacacatttatatttgaaatacagcatttatggctcaacttaagctattgcattgtaattaatctgtattaatctttttatattaaaggggta

SEQ ID NO: 1155 - DNA, 201 bp, Homo sapiens
  variation 101: note = n = T or C
  source 1..201: mol_type = genomic DNA
aactagatgtggttatttatcatttgaagtactctattcaggaaagcacattcaaagtgtgggaggttagcatttaaaactctattcagaaatccactttncagaggctgctactaccagctatttatctcagatgaatatcagggttggggttataaatttgcttaatggtcatatatgtcatcattttcaagcaattct

SEQ ID NO: 1156 - DNA, 201 bp, Homo sapiens
  variation 101: note = n = C or T
  source 1..201: mol_type = genomic DNA
gaccttccaatggcttcttaaaatgatatccaaataccttgccacagcctaccagagcctagaggagacctgccggtttctccaattctgtctttcacccnctccccattgttcatcatgctttacccacactgtctctatccctattccttaaacacaccaagtcctctcctgcctttgtacttgatgtgtcttctgtct

SEQ ID NO: 1157 - DNA, 201 bp, Homo sapiens
  variation 101: note = n = T or C
  source 1..201: mol_type = genomic DNA
gcaactacagaagacaaccaactacaatagaggtttacgaaggatgctggtattcccttcatgagaatttttcataatgccttggtaaagacagttttctncaaactccctgagaggtaggtctattccaacattcctactgtcctgtgtattctaatttctttctctgttttatactagagaagttctggtctctcagtc

SEQ ID NO: 1158 - DNA, 201 bp, Homo sapiens
  variation 101: note = n = C or T
  source 1..201: mol_type = genomic DNA
tgctattacaagtacttacccctgataggccattcattgaactgtttacttattcattaaatactaagcgtctactacataccatgcactgtactaggtgntgagaatatgaaagaaaacaaaacaaaaaacaaatgaaaatctctgtctacattttacattctggtaggggagatagaaaatgagcaaacgaataagtaa

SEQ ID NO: 1159 - DNA, 201 bp, Homo sapiens
  variation 101: note = n = G or A
  source 1..201: mol_type = genomic DNA
accaatcagaatggctattactaaaaagtcaaaaaaataacagttgctgacaaggttgcagggaaaagggaacacttatacactgttggtggaagtatgangtagttcaaccattgtggaaagcagtgtggcaatttctcaaagacctaaaaacagaaatagcatttgacccattttggggtatgtacccccaaaatagaa

SEQ ID NO: 1160 - DNA, 201 bp, Homo sapiens
  variation 101: note = n = C or T
  source 1..201: mol_type = genomic DNA
tgtgaccacatcactaacttctgcttctgtgatcacattttcttctgattctgaccttcctgccttgctcttataaaagcccttgtgattactttaggctnatccaaaatgatccaagataatctctctatctgaagatccttaacttaatcacatctgtaaagtccccttttctgtgtaaggtaaggtagtcacaggttc

SEQ ID NO: 1161 - DNA, 201 bp, Homo sapiens
  variation 101: note = n = T or C
  source 1..201: mol_type = genomic DNA
aactacccactgggtattatgctgattacgtgggtgacaaaattatctttacacccatgcaacaaaactgcacatgtgctccttgaacctaaaataaaagntggaaaaaacccaaattatgccagctctacataaaattttccagaaaatctcatatattgaattatttgtcattatttatggaatcaatattattccaac

SEQ ID NO: 1162 - DNA, 201 bp, Homo sapiens
  variation 101: note = n = G or A
  source 1..201: mol_type = genomic DNA
ttcacatagcaactataaagtgaggatatgaatttttgttgttggaggtggtgtgttaaagtatttgaattaatgaccaacacttttgaattgagacaacnaacgtatttaaaaatgctcaacatcactaatgatcagggaaatgcaaatcaaaactacaattgtaataccaccttattcccataagaatggccataatca

SEQ ID NO: 1163 - DNA, 201 bp, Homo sapiens
  variation 101: note = n = T or C
  source 1..201: mol_type = genomic DNA
gccaaaaaatccttttgataaaagtcaatatccctttgtaataaaggcccttatcaaaatgagtataggagaaacgtaccttaaaataataaagaccacangacaacccataactaacattgtactgaacgcagaaaattgaaggctttttctctgaggacttgagaaagacaaggatgcccacgtttattcaatataaac

SEQ ID NO: 1164 - DNA, 201 bp, Homo sapiens
  variation 101: note = n = T or C
  source 1..201: mol_type = genomic DNA
agaatgtttctgtctattttctatgtgaagatatttccctttgcactagaggccgcaaagcgctccaaatacccacatgcagattcttaaaaagcatgtancaaaactgctcaaggaaaggaaaagttcaactctgtgagttgaacgcacacatcacaaagaagttttcagaatgcttctgtctagtttttatttgaagat

SEQ ID NO: 1165 - DNA, 201 bp, Homo sapiens
  variation 101: note = n = G or A
  source 1..201: mol_type = genomic DNA
cactgatagcaagagtctgtatttccggacctctattcctccagcatgtctgatagtttgataagcaagaattaatactgtttgtattaattctccttccncttgaaatactagagtgatcaaatactaattgctaatgcacttatcttctactaataaataagctcatctgctagaagggtatttgagggacatctttac

SEQ ID NO: 1166 - DNA, 201 bp, Homo sapiens
  variation 101: note = n = T or C
  source 1..201: mol_type = genomic DNA
tgtcatcatcaaatagagacaattttacttcttactttcttattaggatgcatcttatttctctctcttgcctaatttctccggctaagacttctagtagnatggtgaaaagaattggcgagagagagcattcttgttttgtttctgatggaaaaatattcagcttttcactattgaaaatgaaattagttatgagtttgt

SEQ ID NO: 1167 - DNA, 201 bp, Homo sapiens
  variation 101: note = n = C or T
  source 1..201: mol_type = genomic DNA
attgtaatatcttcttgttggattgattcatttatcattatataatgatcttctttgtcttttttttttcctgttgttgcttttaagtctgtttcatcagnaataagaatagctaccctgcatgcttttggtttccatttgcatgaaatatctttttccaccccttcaccatgagttcacataaatccttacatgctatgc

SEQ ID NO: 1168 - DNA, 201 bp, Homo sapiens
  variation 101: note = n = G or C
  source 1..201: mol_type = genomic DNA
tatcatttaaagggaccacactcttcccttcccagcactcccatatcactaataaacatctttcaatgttacccgagatgatattaatgaagtgactggtngtggacccctagagagcttcaggatatggaatggttgccagaggcaccaatcatgtgattagagggttaaaattttctccacccctttaccaggagaaga

SEQ ID NO: 1169 - DNA, 201 bp, Homo sapiens
  variation 101: note = n = T or C
  source 1..201: mol_type = genomic DNA
ggtcatactgcccaaagtaatttataggttcaatgctattcccattaagctaccattgactttcttcacagaattagaaaaaactatttcaaatttcaganggaaccaaaaaagagcccacatagccaagacaatcctaagcaaaaacaaacaaacaaacaaacaaaaaaacaaagctggaggcatcatgctacctgactt

SEQ ID NO: 1170 - DNA, 201 bp, Homo sapiens
  variation 101: note = n = A or G
  source 1..201: mol_type = genomic DNA
aagccagacaagtatattacataaaaattacatgttattagccctgatgaacataaattcaacaaaactcaacaaaatactgcaaaccaaatttaaaagcntatttaaaaaatcattcatcaaaattaatatttgcccctgaatgcaaggatggttcaacatatacaaattagcaagtgtgatacattaaattagtagtat

SEQ ID NO: 1171 - DNA, 201 bp, Homo sapiens
  variation 101: note = n = G or A
  source 1..201: mol_type = genomic DNA
ctggagagagtgctgctcccattctcttaactagaaaagtcatgggaaattataaaaaccatatattttcttgaacctatgagatagctgaggttacaggncaaccagctaggctgaactctaaagaaaagcagaaactgccaaggagaaatgtggaaacatgcactaagttacctaggacagagcaagagacaaatacat

SEQ ID NO: 1172 - DNA, 201 bp, Homo sapiens
  variation 101: note = n = A or T
  source 1..201: mol_type = genomic DNA
ctggagaaactggattgtgctgatcttttcccagctctgtgttgaatgacttgatgttggtatttagaaactggtcatgctgggagaatttacaccacagnaaagaataaatgctacaaatcaaagctgttctttggaggagcagccagtcagtatttaccagaacagcacttgtcgtattgtcacttcaaccagtaaact

SEQ ID NO: 1173 - DNA, 201 bp, Homo sapiens
  variation 101: note = n = A or G
  source 1..201: mol_type = genomic DNA
atagccatacttgttgaatgatggagaatttgctcaggcgcctagcttgcagaacttgctggaatcttgttacagagttctgtgaaagctattcactaagnggtgcctttcactacaaaacaatccaagtggaagctgctggccactggctgtggctgcctggcatacactgaaggtactggatgctgaggaagctgccca

SEQ ID NO: 1174 - DNA, 201 bp, Homo sapiens
  variation 101: note = n = T or C
  source 1..201: mol_type = genomic DNA
aatttttcagcaagcacacaaacatcacacaaacatccctttgttttcctctacctgttgagacatggattttttccctcaaaggtataatcttgttccangtctctaagtatcaacaagttcctgctttatcctctgaatattgtgccctccctcaacctttttttctaaatatcttttaattatcaaataaaatttata

SEQ ID NO: 1175 - DNA, 201 bp, Homo sapiens
  variation 101: note = n = T or C
  source 1..201: mol_type = genomic DNA
gtcactgaggatctcatctgttcccctgactttacacacaatctacaatcaacccagatatttccttacagttccagacttacaaattgaattgcatgctngacatctatactcagaaatttctcaagaatctcaaaatccccatcccccaaactgaatttgaaactttccattctcaaacccatttcttctctagcagtc

SEQ ID NO: 1176 - DNA, 201 bp, Homo sapiens
  variation 101: note = n = G or A
  source 1..201: mol_type = genomic DNA
tgctcctgctggcgccttaaagcacccaatcagatcccgcattcactcactcacatgctccctcctgcaagaagttgagcccagtaagccaagtaaacagngcacccccgttgcaagtctgacaaaggggtcaagaaaaatccttcatcaattataatggattatagtcctgtaattacattatgttatatagtatatgct

SEQ ID NO: 1177 - DNA, 201 bp, Homo sapiens
  variation 101: note = n = A or C
  source 1..201: mol_type = genomic DNA
attctgagatttagagcttccatttgtgttatgcctcaaagagagtatagacgtgtttttgtttttctcttgcaactctttttaacagtaatctattgtcncttgttatttgtcacttgttggcttatagtaagtggtgtgatcactgtttttctgactacgtttcagtcttaggcatgcattgtatccctgagtctatga

SEQ ID NO: 1178 - DNA, 201 bp, Homo sapiens
  variation 101: note = n = C or T
  source 1..201: mol_type = genomic DNA
gacttctttcttttttttttaacacttggatatttattttatgatttaatttgtaattcaatacaatttaatgtattttttggtcaaattaatccaggttnggtcattagcatattttttacttagcttcgttgtctctcttttttattttattttatcattattatactttaagttttagggtacatgtgcacaatgtgc

SEQ ID NO: 1179 - DNA, 201 bp, Homo sapiens
  variation 101: note = n = G or C
  source 1..201: mol_type = genomic DNA
actaagtctcctggttgaatagcagggagacttattctttcctttgtgggagagggcaatatttggtttccatatgcttggagggctttttgaacctggcntaattttacatggctaaaagtgaaagtaaaagacatttactctcaagatcttttgctattatttattggtgaattgcaaagttaaaataattcaaagtta

SEQ ID NO: 1180 - DNA, 201 bp, Homo sapiens
  variation 101: note = n = A or G
  source 1..201: mol_type = genomic DNA
cttccatcttccctttggtgttaatataattctaaaatatcttgcctcttgagttcttccaaggcctagcatttgtctacctgaacttttttttctagctnctgtcccccattctgcctctccttctccagctcagactacatggaatttttttttaattcttctaaagcaccagattctcattcacctctctggcctctc

SEQ ID NO: 1181 - DNA, 201 bp, Homo sapiens
  variation 101: note = n = C or T
  source 1..201: mol_type = genomic DNA
gaaaaccagatacagaagttcatgctgcttagcttactaacagtccaacctaggtcaagaaatgttttctgtatggtacctgagcatgtcaatgatcctanacatacagaaatgtttataacaagtcataggtggttccaacacttcaaaaggcatcacatcataattttcaaaatgtggaggtcagcagtgaggcagcaa

SEQ ID NO: 1182 - DNA, 201 bp, Homo sapiens
  variation 101: note = n = G or T
  source 1..201: mol_type = genomic DNA
ttgagcaggtaacatatgtcacatattgtaccaagtatttcgtatcacttcaaatgaaactgtcatctaccctgttcaagccagaaaccttggtaccattngttagaccagactctagatcatccaacaagtctaaagtacaacccactatttcaattttatttccaaaacatatttcaaactcatcctttttttttcaga

SEQ ID NO: 1183 - DNA, 201 bp, Homo sapiens
  variation 101: note = n = A or C
  source 1..201: mol_type = genomic DNA
tatctttcaaggatgaaaataaaataaagattaaataaaataaataaaaactgagtgtataatcaatagacctcattaagggattttaaaaaaatctgttntgggaagaaaaattataatacaattgattcttgttactcactgtagttaggttccatgaagttgccatgaaaactgaattagcaaatactgaatcatgtc

SEQ ID NO: 1184 - DNA, 201 bp, Homo sapiens
  variation 101: note = n = A or T
  source 1..201: mol_type = genomic DNA
ttaaatataattctactgttgatgaacattttaaatgttttttattttaaaacatttttgatttttcacaattgtacgttgttactaacaacatcattatnaaatcttttcccacctctctgtaagaggtttttcaatgcaatttcatcaggaattggaatataggtcatagagcataaagtaacttctgctttactgtat

SEQ ID NO: 1185 - DNA, 201 bp, Homo sapiens
  variation 101: note = n = G or A
  source 1..201: mol_type = genomic DNA
aatatcaagaagcctccctgggctgcatgtggctcatgggttggacaagctcgatttaaagcattctttcaggtacaagcatgatttgaggagctttagcnaaattatgtctgccccaaatatctcacccaatgtccctaaatatgaccttaaactctaacatttttaaatattagttcattgctacatatttgcatattc

SEQ ID NO: 1186 - DNA, 201 bp, Homo sapiens
  variation 101: note = n = A or C
  source 1..201: mol_type = genomic DNA
aatttattgaactttgccagaatgctcttcaagaactcacgaagtataattactctcaaactgatctcccctgatgcattgggatctagcaacactagccnccttgctttttctcacacactccaggcatcctcccctttaagatttgtgtactagctattctctctatttcaagtgctctcccccaagaatctccacagc

SEQ ID NO: 1187 - DNA, 201 bp, Homo sapiens
  variation 101: note = n = G or A
  source 1..201: mol_type = genomic DNA
ttttcccatccagacaccactttaagtgctagaaatgcagttctgaataaaatagacaaggcctctcttttcttggaacacacattctggtggtataagtngaggacatgaaaagaatacaatgacaaaataggttttaaagtgattgaatgcaagtagggcttttatatttcataaagggctattaaaataggtttctct

SEQ ID NO: 1188 - DNA, 201 bp, Homo sapiens
  variation 101: note = n = C or A
  source 1..201: mol_type = genomic DNA
tacagcactatacagctttcataactcatttgatccacataaaaaccttgtacgatctgaagatcaaataggtaaaataactcacccaaggtcaccctgcnaatgaatagaaaaattggaattcaattaagagaactagagcaagcttcctttcactgcaccgtagctgccttgcacattcactgtatcgttgagttagag

SEQ ID NO: 1189 - DNA, 201 bp, Homo sapiens
  variation 101: note = n = G or A
  source 1..201: mol_type = genomic DNA
gaaccacatttgaggctgccagttgtttgagtttttgttagtctaccatgatttgccaaatgcaaccgttttttgtaggagccaaacaaaagcaactgaantgggtatatgacgaggactctcatgtctatatcttttaggtttttgttggtggcactaatctcttcagttattcccgggatacaatattgttcctgtttc

SEQ ID NO: 1190 - DNA, 201 bp, Homo sapiens
  variation 101: note = n = A or G
  source 1..201: mol_type = genomic DNA
gcatgcctttgtactttctttcctctttgcgggacaccagaaagctctaaatgctggaaacaaatgtctctatcacacaacctacagaataactggtgtgngagtagagaagtttagcttccttgtgtttaactgggaaaaacattggaggataatttattttcctgatatcctgggtgggaagaagttgaggtcggtact

SEQ ID NO: 1191 - DNA, 201 bp, Homo sapiens
  variation 101: note = n = T or A
  source 1..201: mol_type = genomic DNA
atatttcctcctatattgggttgttgcagttttccactgactttagtcacaaggtcatatgagtaataagaagaaatgtaggggattacttgcatgccagntatgttcctccttaccctcactgtgtagcagcaacccaatctccctttggtagtcaggatcaattgccccaaaagatacagcaatccccttctgccttcc

SEQ ID NO: 1192 - DNA, 201 bp, Homo sapiens
  variation 101: note = n = T or C
  source 1..201: mol_type = genomic DNA
cattgtctcactttacttgctattgggtgaattttttggttagaatcaatgctatatgaaaaaatatgatagtaaataagggattccctgagtctacaganaactgctttggcagaaacattgtgggctgtgggcagggaagacacattccagagtaagcatgtattccagtgaggacaaaagtttgcacatttcttgatg

SEQ ID NO: 1193 - DNA, 201 bp, Homo sapiens
  variation 101: note = n = C or T
  source 1..201: mol_type = genomic DNA
aaccaccaagcctggccttaaaatgtattttagcaagtacatactgtgtgtcaggcatcattacaggtgttggaccacagcagagaacaacagaaaagttnaaagaaccctgacaggtttatagtatttacccattgatagggcttatagtatttacccattgttgcaggttaggctctccaaggaaatgggctctgagat

SEQ ID NO: 1194 - DNA, 201 bp, Homo sapiens
  variation 101: note = n = G or A
  source 1..201: mol_type = genomic DNA
tttgttttaaacaaaccttccgggcaattctgatgcacaatgagtcttgagaaccatcattctaaaacaaaataatctgactgcaaatctacagcataatntgatagaaacaaaaagaactgcccaaaatcgaactcagtcactaattatatttttgcactaacattaaattattattttgaattttttcttatattttta

SEQ ID NO: 1195 - DNA, 201 bp, Homo sapiens
  variation 101: note = n = T or C
  source 1..201: mol_type = genomic DNA
ggacgtattatgatgaagttagtgtatttagcgtattcatcacctcaagcatttatcatttctaagttttgagactatttcaagtcctcttctctagctanttggaaacaatacattattgttaattacagtcgctctatgctgaaagcaaatgttaggtcttattccttctatctaactctatgtttatacctgtgaact

SEQ ID NO: 1196 - DNA, 201 bp, Homo sapiens
  variation 101: note = n = A or G
  source 1..201: mol_type = genomic DNA
atggccgcagcccagttgtcctctgatatctcatgggatactagccaccagaaccaaccaatcaggtagcccctgaattcctgaccctcagaaactgtgcnacataatacatgttcatttattttattagaaccactaagttctgtggtaatatatagatagcaatggatcactaacataaatgtctagagttcactaggg

SEQ ID NO: 1197 - DNA, 201 bp, Homo sapiens
  variation 101: note = n = T or G
  source 1..201: mol_type = genomic DNA
gggagggatagcatttcgagatatacctaatgttaaatgatgagttgctgggtgcagcacaccaacatggcacatgtatacatatgtaactaatctgcacnttctgtacatgtaccctaaaacttaaagtataataaaaaaaaaaaggaaaggaaaaaaaaagaaagagggtgacaaggatgtttgttttgcaagtatgct

SEQ ID NO: 1198 - DNA, 201 bp, Homo sapiens
  variation 101: note = n = T or C
  source 1..201: mol_type = genomic DNA
ccttaatttatgagatatttttaccaatcaatttttttaaatgacaagaagaaaaatgggcaaagaacacaaaaaggcaatttacaaaagaaaaggtcaanagcatgagagaaagctaaaccacacccacagcaataatccaatcattcaatatgttaaaataataagagaaacagcaccaatagtggataagaacacaaa

SEQ ID NO: 1199 - DNA, 201 bp, Homo sapiens
  variation 101: note = n = A or G
  source 1..201: mol_type = genomic DNA
gaggtttatttggctcacagttcagcagactgtacaggaagcatggcatcagcatctacatctggtgagagcctcaggctgtttccactcacagtggaagntgaagaggagacagcatgtgtagagatcacacagtgcaagaggatctcacagagagaagagtgaggtgccaggctctttgtgacgaccagttctcatggg

SEQ ID NO: 1200 - DNA, 201 bp, Homo sapiens
  variation 101: note = n = G or A
  source 1..201: mol_type = genomic DNA
tcgagctcataccaaagccgaggcttttggtcagcctgaacacactcaggctgaactcaggggcccgttgcccaggatggagataaaactacctatccctngggcttttgtgaaaatttaatgtgatactgccatcactacagtgcctttcttagtatacaattgatatgaaaatcatgatcagaaaatatgatctcgaat

SEQ ID NO: 1201 - DNA, 201 bp, Homo sapiens
  variation 101: note = n = G or C
  source 1..201: mol_type = genomic DNA
caaagaagatgatcatggagatggcacatgccagattatggaagaccttgattactgtaggaaagagtccagcctcatcctttttggatgatgtgtagatnatactgggaaaggaggcatggagaggttagatcaagaaagtagtaaaattagcggagtcatttagcttgctctgacttcaacaagcagaggattggaggg

SEQ ID NO: 1202 - DNA, 201 bp, Homo sapiens
  variation 101: note = n = A or G
  source 1..201: mol_type = genomic DNA
tttaacaggcttgctgataacaatgttgttgataccgatggcagcacctatcatttgggaggtgtttccaaggtgcaagacaatctgctaattacttaacncaggttatctcacttaattccttcaacatccttatcatgattattgctcttactgtttgaggaagctgaggttcagagaggataatcggcttgcttaagg

SEQ ID NO: 1203 - DNA, 201 bp, Homo sapiens
  variation 101: note = n = C or T
  source 1..201: mol_type = genomic DNA
ttggtgttctagtatttttgcatgcacgtttgtcaggaatactggtttaaaatttattttcttttagtgtccttgtctcactttgatatcagagtaatganggtgaggtgcaatgagtttagaagtattccctcttcttcaattttctgggagagtttgagaaggactgatattcttcttctttatatatttggtagaatt

SEQ ID NO: 1204 - DNA, 201 bp, Homo sapiens
  variation 101: note = n = G or A
  source 1..201: mol_type = genomic DNA
aacaacagaagtgaaggacataatcttctgtttcttcatcataacattcactgtgatatcactatttattttgaatttactgtttaaacacagaatttggnatagcacagggaccagagacaagagttgtactggaagcacgcatgaagcattacaagttgttacttagttttcaaataaatgtatgtaactgggtccaag

SEQ ID NO: 1205 - DNA, 201 bp, Homo sapiens
  variation 101: note = n = G or A
  source 1..201: mol_type = genomic DNA
caaaacagctagaagagaggttttttaggctttcaaaggtactgtatattatgaaatacctagaagagtgggttttgtggcttcatcatcaacagatgatnaatgcatgaggtgatgaatacactagctatcttgattatattattatacaacatatatgcatatcagaacttcaaattgcatcccataaatatgtacaat

SEQ ID NO: 1206 - DNA, 201 bp, Homo sapiens
  variation 101: note = n = G or A
  source 1..201: mol_type = genomic DNA
ataaacttggtgttataagtagcattagaacacaggttcgacatccatattaacttgttcaataaatatttatagttttgtgtatctccttgtgtttaagncattatgctgggaattgtgtaaaatgtaaccatcagttctttgaaatccaagaattatatttttctcgacatcccctaaaactcccaataatttttgtca

SEQ ID NO: 1207 - DNA, 201 bp, Homo sapiens
  variation 101: note = n = T or G
  source 1..201: mol_type = genomic DNA
ctgggtaacgggcagaggttggaagagtttggagggctcagaagaagacgggaagatgtggaaaagtttggaactttctggagacttgttgaatggttatnaccaaatatggagatattaaaatttagtgataaaagtgggtttgtgtgttgggaattttgcttttgcttttccatttttaacgatgacaagtttacaatg

SEQ ID NO: 1208 - DNA, 201 bp, Homo sapiens
  variation 101: note = n = A or G
  source 1..201: mol_type = genomic DNA
gtagaggtacggccttgatatccttggataggatccagaacaattctcttaattaccaggcagagactcttgttctctttcctaactttctctgaaacaantggagtttttctctctgttctgagctgcgtgaagccagaggtggaatgatgcagcacccctgtggccaccatcacttgaactacactgggtcagatctga

SEQ ID NO: 1209 - DNA, 201 bp, Homo sapiens
  variation 101: note = n = G or A
  source 1..201: mol_type = genomic DNA
agagtgtgaataggagttgaaatgaacaactgattgaaaacctttcaaggaaaatctggataatgaaatagtgttagggattatccacctattcctggaantctagaaggaacacatgcatgcagaggactttgtgcatgcccaagactgtgtacatacatcaagatgatccgggaaggccctaatctctctgttctagtt

SEQ ID NO: 1210 - DNA, 201 bp, Homo sapiens
  variation 101: note = n = C or G
  source 1..201: mol_type = genomic DNA
accaagtgtgctcattggctcattgttacttggtattgtagtttccaggccctctagtctaatcaagcagggtgatacacgtatgtaagctaacctgtatngtatgctcatatctacaaatattcctatatgtaattgtatgtgtctattttaagcaaaacctagattcatattgatgttaccagctctctgacatgaatc

SEQ ID NO: 1211 - DNA, 201 bp, Homo sapiens
  variation 101: note = n = T or C
  source 1..201: mol_type = genomic DNA
attttataatattatatattatataagatataaataatatatatattattttcctgccatgttagaattttcatttttataataacccattgcattagagntgatgtaatcctttggtgggtctcataatgccgtttgttaccagtttcagaaatgttatactgtttttttctcatctggagaagatttcacttctactat

SEQ ID NO: 1212 - DNA, 201 bp, Homo sapiens
  variation 101: note = n = G or C
  source 1..201: mol_type = genomic DNA
ttcctgagccttgaggagctggctggtaatgaattctaatcttttgttgtcccttgtgcctatttgtgagtaatcaatctacttcatgtcacttgttgtanaggaagtgttctgactcaccagagtcaaacaggttggtaaccagtgaacctgcttcacacatactttaattaaaaattcttcatgtacatttcacaataa

SEQ ID NO: 1213 - DNA, 201 bp, Homo sapiens
  variation 101: note = n = C or T
  source 1..201: mol_type = genomic DNA
accacctatgcatcaaaggggacagcctgaactggctccacccacccattacaggacaacactatccagaagcctagggattgttcaacccagtccaccancagcgatacttcaacaccgctcccaggttctcagttcaagtgggcccattcaaccttcccctaacatccaacagcacgtgccacctgcatgtcttagaac

SEQ ID NO: 1214 - DNA, 201 bp, Homo sapiens
  variation 101: note = n = T or C
  source 1..201: mol_type = genomic DNA
agatatttctaacatcatttgagcatctggatcagccacatcatacatgaatagaccactggagttttcagtttcattatccaattgtccattgtcccctnttctgcctaagctattttgagttgagtttctgtgacttgcagccaagacttttgaaatatacaccacctactttctccagagatcaaagtgggccactcc

SEQ ID NO: 1215 - DNA, 201 bp, Homo sapiens
  variation 101: note = n = T or C
  source 1..201: mol_type = genomic DNA
cattttattcctgagtcaccctaaacattccatattacctccttagaatgctgttggatccctttagtcataattagtaaaggtgattctcaattatgtangtgagactgatttgaaatgtctattttttatatgttccttggtatatttttatatctgaaatgcttgcctcataaaatgagttggagagtattacccttt

SEQ ID NO: 1216 - DNA, 201 bp, Homo sapiens
  variation 101: note = n = C or T
  source 1..201: mol_type = genomic DNA
tatatatttgcaaagaaatctcaagaagaaaggcagaaagctaacaaaaatactacttcctaagaggcatagaattttagtgggtggagaacaagcatggnaagactgttcacctctttaacattttttgtttttgatgttttcaaatctacctaataaaattaaagagataaatataaaatattaggaagttataagagg

SEQ ID NO: 1217 - DNA, 201 bp, Homo sapiens
  variation 101: note = n = G or A
  source 1..201: mol_type = genomic DNA
gagctctgtccaaggaagtttacaaacctctgtcagctagagaacattggcaggccccaggggaaatctcacctggtaagtgggatccacttaagggagcngtctgtccacactttcatagagcagctgtgtcatgctgggttaccacttcttcagtcatcttgggctctctaaagctcacaggctggaacaattgtcacc

SEQ ID NO: 1218 - DNA, 201 bp, Homo sapiens
  variation 101: note = n = G or T
  source 1..201: mol_type = genomic DNA
ggtttttagtatattcttttcattaactttgtaaaaagaaatacctttatttaagtttttttttttttttcccctgcattcctctttcctctgcttctggntctctaattatacagttactccaattactgttggctatttttccctatgtgattgaggatctctcgttttatcacgttacatttttttctttgggcctca

SEQ ID NO: 1219 - DNA, 201 bp, Homo sapiens
  variation 101: note = n = G or A
  source 1..201: mol_type = genomic DNA
ccaacatgatgtcatgtggaaattttaaacttaattacatctacaaagaccccctcctcaaaataaggtcacattcacaggtacctggggttacaacttgnagatatctttagtgtggagtagacataagtcaactcattatttcacatagtatgcatttatttatttgttaattctgtttccttccactagaacatcaag

SEQ ID NO: 1220 - DNA, 201 bp, Homo sapiens
  variation 101: note = n = C or T
  source 1..201: mol_type = genomic DNA
ttacagctgaaaagagagataggcaaccatacaataatagctggaaacatcaacaccccactttcagcattaggcagttctttcagttggagaatcagaanagaaactttggactcactctacactatagatcaaatggatctaatacatatttacagaatatttcttctaacacctgcagaatacacattcttctcttca

SEQ ID NO: 1221 - DNA, 201 bp, Homo sapiens
  variation 101: note = n = G or C
  source 1..201: mol_type = genomic DNA
gtgtgtgtgtgtgtgtgtatacacatatattttaattaacttgtatcattacttttttttaatattctcctctaaactgtataggatgaaatcccagaatnctgaaagcctggtgtaggaacttcgtttcccagagaaccttgccaaaagaattctggtttaattagagttttctttgagctagattagaaatttaaattt

SEQ ID NO: 1222 - DNA, 201 bp, Homo sapiens
  variation 101: note = n = G or A
  source 1..201: mol_type = genomic DNA
gtcctggagtcccagaccaggcattcctctccagtgaggaaaagtgaggaccagcacctgtgtgcctgtgtggagaacagtttggccacatttccattagntgaatgctttgtgctaggggtctcgaccagcccctgctcctgtggactctccaaagccttgagacaataagggtgagggctgtgagacagcaaagatggc

SEQ ID NO: 1223 - DNA, 201 bp, Homo sapiens
  variation 101: note = n = A or G
  source 1..201: mol_type = genomic DNA
agcagatgtttgggttggggttggaagtgtttcctggtgttgctgttacataatgtgatttatgctgtaaaactatcacttaggtatgtatgaagaatgcnctggagtttagaagtctagtgatcataccttgggtattccacctataaaaatacaatattgagaggtgtggtggttctcacctgtaatcctaacaccaga

SEQ ID NO: 1224 - DNA, 201 bp, Homo sapiens
  variation 101: note = n = G or A
  source 1..201: mol_type = genomic DNA
cacaccatgtattagtgttttccagagaaacaaaccaattgtttgcgttctgcagactagagtaagctggcaggctggagacccagggaagagttgattgntgttgcagattgagtctgaagaccacctggaggaagacagaattctctcttccttggggatctcagtaattgttctcttaagatcttcacctgattagat

SEQ ID NO: 1225 - DNA, 201 bp, Homo sapiens
  variation 101: note = n = C or A
  source 1..201: mol_type = genomic DNA
aacaatgttattcaaggacctgctgtatgtcattttagctttccttcttagcctagtgttgtgttatatgtaatttttactattctctcagtacctaccanagtagttaacttagtacatatacgagtataataaattcatgctgaataaatgaatgcatgagttaattaaagtaagtttttgctgacttagaaagtataa

SEQ ID NO: 1226 - DNA, 201 bp, Homo sapiens
  variation 101: note = n = G or C
  source 1..201: mol_type = genomic DNA
atcatatacagactttattatgtttaggtacatttcttctatgcctaatttatttagaacatcatgaaaaaatattgaattttgtcaagtattttctcttntaggggcaacaggctggggctggtgatgtgggtggtaaaagaatttaccaaggtagtcataggtaaagaaaggcagattaattagtaaaactacaaagat

SEQ ID NO: 1227 - DNA, 201 bp, Homo sapiens
  variation 101: note = n = T or C
  source 1..201: mol_type = genomic DNA
atcggggagagcaatggtcctaagcatgagaattaactcagttataaaaaataatcttgaatttactaaatcagaatctatcaagatggagcccaaatganggaaaattttaaaagattccacaagtaattctgtgtatcattcagatttgggaaccactgatgtaaagggcataaactcctctcacagagcttcagaaat

SEQ ID NO: 1228 - DNA, 201 bp, Homo sapiens
  variation 101: note = n = G or C
  source 1..201: mol_type = genomic DNA
gctctacaaatccttaccaattgaagcagtagaaaacaccaaaaaaaaaaaaaaaggtaaaataaattgcatgctatcatgccaagggtcagggtccagcncaagctgaggtctgaggggagtaggcagactggtggcaggtagctcaaagaacacctggggcccgtaagcaggtgaaatgtggctttattatgctgtatc

SEQ ID NO: 1229 - DNA, 201 bp, Homo sapiens
  variation 101: note = n = A or C
  source 1..201: mol_type = genomic DNA
agctgggaagctacaggagaattttaaatagaaaatggcgtgatctgactcgcactttcgaagactcactcctcctgctgattgaagaatagaccacaggnaagggaggcatgaaaatctaaggtcaaggttaagtttccccaggacttcacagccttactcaaatgcactcgagtattctttttggctgataccgttggc

SEQ ID NO: 1230 - DNA, 201 bp, Homo sapiens
  variation 101: note = n = A or C
  source 1..201: mol_type = genomic DNA
ttcaaccttgttttccaagacagctcctatttgtgcttcagtctccagcttttatactttttttctttttactttcccatgtcctccagcttgacttaganatctttctgtatatatttccaatgcagtcttcactgccctttttatagcacttaacacactgggttgcgattgcctgtttaattgcatcaaagcatgctc

SEQ ID NO: 1231 - DNA, 201 bp, Homo sapiens
  variation 101: note = n = T or C
  source 1..201: mol_type = genomic DNA
ttggcatttcaggcccatttgtgtatcagctggacattaaggatatttttcctttaaaaatgctcatatgcacaatattttgcttaagatttaagagtgancatagaatctcctaaagtgtaattgtacagtcaaagtcaagaatttttgaattataattccttctttgtgcattagaacccctttcattagcttgttcct

SEQ ID NO: 1232 - DNA, 201 bp, Homo sapiens
  variation 101: note = n = G or T
  source 1..201: mol_type = genomic DNA
atgtccacagttgatgtcaaaacataactgtggtacctgcataccacggaatactacatagcaacaaaaactggcctattgctacatgcaataacttgaangaatattcaattattctgaatgaatatagtcaatacctaacacatatgtgccatatgactccatttatattacattgttttaaatgacacaattttataa

SEQ ID NO: 1233 - DNA, 201 bp, Homo sapiens
  variation 101: note = n = A or G
  source 1..201: mol_type = genomic DNA
ctttttcctggtcagattggaggttctttgctattacttgccacaattgtaactatatagaagtggtgcattatttgctaatcgtctgttttcctgacaanaaaacgtactggatctgcttcgttcagaaactatccttagtatataaaagagtagctggcaattagtagcagctttaagaatttttgaattagtgattgt

SEQ ID NO: 1234 - DNA, 201 bp, Homo sapiens
  variation 101: note = n = C or T
  source 1..201: mol_type = genomic DNA
aaaaagggaaaaccattttaaggaacaagagtgatcctataaacctctttaataaattcagatttaaaagaggtcaaaaaaagtatgtgaaatttgggagnaacgcaagaagatgggctgcacatcatttcaatgtcacatgaattaacatctgttcaactatcatctgcgtaaatatatacttagttaactcactgtttc

SEQ ID NO: 1235 - DNA, 201 bp, Homo sapiens
  variation 101: note = n = T or C
  source 1..201: mol_type = genomic DNA
cgtattgtgaaacagtttgatcaatgttatggtataaaatattgaactctaaagtatgatagccctcagaagtatgaaaaatctgtttgtccttactagangtggtagaaatgtcagaattgctgtggtaaatgttagaagaaggaattctacggtttaaagatgtgagcatatttgagtagatgtactatgtaagaccag

SEQ ID NO: 1236 - DNA, 201 bp, Homo sapiens
  variation 101: note = n = G or A
  source 1..201: mol_type = genomic DNA
gaaattaagtaattcaaacttaaagctgtttgaactttaaattattttgagccttgagtcgaatatagctatgtggcctgagtcacgtagcttgtagctgnaacttctgcctctctgattacagattaaatcccttcctcagtcctgtcctgtaaatgattagaaaagaccaaatagtgccagagagaagaccccttaaga

SEQ ID NO: 1237 - DNA, 201 bp, Homo sapiens
  variation 101: note = n = C or T
  source 1..201: mol_type = genomic DNA
ttaactgtaacaaaaggattgcagcagtaggcatgtgacataagatacacttgtcctatcacatactacactacccagaagtcccagtcagatagagtgangggatggcttttacaggtgtaactgacaggccagcttggaaactataccattcaaggatgggcatgatgctccaggactcagtaaatcgatgaatataat

SEQ ID NO: 1238 - DNA, 201 bp, Homo sapiens
  variation 101: note = n = T or C
  source 1..201: mol_type = genomic DNA
gtagagttcaggcaatataaatacaatcttacattgtagcaggtttcaatttaatgttaacaattaatttcagtgaatgtgttagtcaaacaaaatcacangtgtcttctcatttcaagtagtcttaagcaaactgactctcaatgtagttgaatgtaaatggtgaaatgtaaaatattctacaattatttatgtagttta

SEQ ID NO: 1239 - DNA, 201 bp, Homo sapiens
  variation 101: note = n = T or C
  source 1..201: mol_type = genomic DNA
gaatatattgttgattagttttcaaccaacctgatggctacagctagatctacggatataggtcacagtaattaaaagggcccaatcttttccctttttanatgagacagtataaatcctcacatgttgatgaattcttgataaatccagttttattcagagtgaatgatgcagtcagatctttctaatctagtttttata

SEQ ID NO: 1240 - DNA, 201 bp, Homo sapiens
  variation 101: note = n = A or G
  source 1..201: mol_type = genomic DNA
ctgcatttttgcatcagaaatctggagaagtctgcacaagagatgtcctggaagcctttcttatatattgattgtgcccagcaattacttcacttggcacngcagtgaacatgaaccacaggaacacatcccactgaactcgcctctgcttaagtgggttccccaagtgccactgctactccaatgccaccagataggagc

SEQ ID NO: 1241 - DNA, 201 bp, Homo sapiens
  variation 101: note = n = C or T
  source 1..201: mol_type = genomic DNA
tttaaaagaagtaaaaattcaaatctaatgctacacagagactacatttttttaaatttttatatatttaaggggtacaagtgcatatttcttacatgctngtattgtatagtggtgaagtctggccttttagtgtacccctcagcagaacagtgaacattctaccaaacaagtaatttttcaaccttcaccctcctccca

SEQ ID NO: 1242 - DNA, 201 bp, Homo sapiens
  variation 101: note = n = G or A
  source 1..201: mol_type = genomic DNA
tggaaatggcaccaaaatcacaagcataaaaaagcaaaaatagacaagtgggattacataaaactaaaaagccttggcacatcaaagaatataattaaccnaatgcaacctacagaatgggagaaaatatttgcaagccatatatctgataaagggttaatattgaaaatatgtaaggaactcctacagctcaaaagcaat

SEQ ID NO: 1243 - DNA, 201 bp, Homo sapiens
  variation 101: note = n = T or C
  source 1..201: mol_type = genomic DNA
tgtatgtatgtatgtatgtatagacatgactggcttagactacagtagtagcattagcagttgtaagattctgaatctatttttaaagttgaaatttgaantggatgtagactgtcagaaaaaaaaaagagaaacaaacataccaattggaatatggctccaaggtttgttttgcattacgaaccagaaagattgtttcca

SEQ ID NO: 1244 - DNA, 201 bp, Homo sapiens
  variation 101: note = n = A or G
  source 1..201: mol_type = genomic DNA
aggggtatatgagtgagcaagcacaggatccagctactgcacacagccaggcatgctggctgtggcagggtggtcagctatacgtgccgtcagagacaccngctccctgagaggctgtggctggaccagacataccagaagcagcttccactatgcactggggaacatggtggcatctggaagcttgaagatgccaggaac

SEQ ID NO: 1245 - DNA, 201 bp, Homo sapiens
  variation 101: note = n = A or T
  source 1..201: mol_type = genomic DNA
aatagtttaaaggaaatatttgtgtaacttcaaaccatatagaagactcccagtaatttaaagctcctcatatactccttaccaatcaaaatcccattaanctcttagaggtagctacaagtgaaatttacaatatggttgacctatgaacaatgttggggttaggggaaccactccccatacagccaaaaatcaaagtgt

SEQ ID NO: 1246 - DNA, 201 bp, Homo sapiens
  variation 101: note = n = T or G
  source 1..201: mol_type = genomic DNA
atctttgtctggtttcagcatcagagtaatactggccttgttgaaaggctttgggagtacttccttctcctcaatttttttgaacagtcttagtggaattnctattagctactcttttgatgtttggtagaatttagtaataaagccattgggttctcagcttttgtttgaggaaaaccttttttttttttcttatcttga

SEQ ID NO: 1247 - DNA, 201 bp, Homo sapiens
  variation 101: note = n = C or T
  source 1..201: mol_type = genomic DNA
ccaaccccagtgtgtccagaaggctggacatggaaactattatcaagattactctggatacttaagatttaatgtcattttccctgctgaattttggactnggttggagcttgtcacttcttccttctttcctatttctcccttttggaatgggaagatttatcctatgcctgtgcaaccattgtattttggaacctcacg

SEQ ID NO: 1248 - DNA, 201 bp, Homo sapiens
  variation 101: note = n = C or T
  source 1..201: mol_type = genomic DNA
ttaggtttgtgtaagtggattctgtgacattcacatgatgacaaaatcacctaaagacacatttttcagaaggtatccccatcataaagtgacccatgacngtgtaatactaactgcctacataattttaaacatttcatagttatgttaaaaagtcaaaagaaagtgaaattaattttaaacatatatttaacccgatat

SEQ ID NO: 1249 - DNA, 201 bp, Homo sapiens
  variation 101: note = n = C or T
  source 1..201: mol_type = genomic DNA
gtagtaaataaaatacaattccaagtttaaaagtactttaaaaccagtaattattgaaattgttattctggtagtcatttaattaaagtctccaagtacanggtagaattatccttttctaccactttaaagttacatgtgactatatgacgtgttttggtcaatgaaccatgagaaaagtgatgtgtactacctctagac

SEQ ID NO: 1250 - DNA, 201 bp, Homo sapiens
  variation 101: note = n = T or C
  source 1..201: mol_type = genomic DNA
tttatagcttcaaatcatgtttacatgctttccaggaacaatcgaatataaatacatgtgtgtatttgcatatacacatgtgcacatacacgtacacatanatataagcaaaatcatgttgttttaggacccccaaataggacgctttgaatacacaaagaattttatttatctctgtagtattctaattttctttttatg

SEQ ID NO: 1251 - DNA, 201 bp, Homo sapiens
  variation 101: note = n = G or A
  source 1..201: mol_type = genomic DNA
cggtaaatcagggatttcttcttggtttgggtctattgctcatgaactagtgtgatttatttgaggggtgttgaagagccttgttgtgtcatattaccacngttggtcttctagttccttctcatttgggtaggctctgtcagagggaaggtctggggctgaaggctgttgttcagattcttttgtcccacaggtgttccc

SEQ ID NO: 1252 - DNA, 201 bp, Homo sapiens
  variation 101: note = n = G or T
  source 1..201: mol_type = genomic DNA
tcaattatcataaagccctatttactgtatgcctgattccatccttgctctttacaatctgatttcagcatcacgccacagactctgttaaaactgaattnatgccatgtcatccttctgctcacaaccaaccaataactcccatctcgttcagtgtaaaagccgagtcctcaccgtggcctctgaggccctgggtgatgg

SEQ ID NO: 1253 - DNA, 201 bp, Homo sapiens
  variation 101: note = n = T or C
  source 1..201: mol_type = genomic DNA
caggtcagaggttggggtgggctctgaggctgagcagggtggctggctgggaattcaagccaggtggaaccttcagctatgcttctggaagcaactagctnagccttgtgtgtgggttgtgctgtcggctggcatctgtggtcgggtgctacgtctgggaggaacacagagctactgtgaaggtgcatgcccttgtttctg

SEQ ID NO: 1254 - DNA, 201 bp, Homo sapiens
  variation 101: note = n = A or G
  source 1..201: mol_type = genomic DNA
aataaagaactggtaataaagaagttacggagataaattactctaaatggaaaataaatgacacttggtgataaggcttatgaggtctgggactcggcccnccatgttcacagcagcatccccaccacccagacatgcctggctcacaattggcacacaataaatcctcgttgaatatttttaataacttgtactcatttc

SEQ ID NO: 1255 - DNA, 201 bp, Homo sapiens
  variation 101: note = n = A or C
  source 1..201: mol_type = genomic DNA
tcatatgtctcaacaatagaaaactgttataaattttttattactctcaatttttacatttatttcattgcagacaggtaaaaaacaggggctgacaggcntcaagtaaccagaaagactgcgtgtacttggtttgctagtcttagcactgcaaatttaatcactttagttataaattgtattattcttatggcctctacc

SEQ ID NO: 1256 - DNA, 201 bp, Homo sapiens
  variation 101: note = n = T or G
  source 1..201: mol_type = genomic DNA
tctaatgctggagtcctgacctcggctaccccagagtgtggctgttttggaaatagcgtctttaaagaggtaactgcaagtaaaacaaggtctttagggtngacccaatgagactgatgtcctttcgtttgtttgtttttttaatttttaagtttggggtacacgcgcaggtttgttacttaggtaaacttgcctcatggg

SEQ ID NO: 1257 - DNA, 201 bp, Homo sapiens
  variation 101: note = n = A or C
  source 1..201: mol_type = genomic DNA
agcacgccatgtttgccaggaccgcagatggttattgtggattaaattagccaaagggtaggatttgagatcggagaagtagtggtggtccagattcgggnggatcctgtggcccacactaagtgctttacttcaatctaagtgaaaaggagagataatggaagtttctgaaatggcaatttgacttatgttttaaaaaaa

SEQ ID NO: 1258 - DNA, 201 bp, Homo sapiens
  variation 101: note = n = A or G
  source 1..201: mol_type = genomic DNA
cgtgaaaaaaataaactactagatgttccttgataaggaaagtttgctcatcccatcctagtggatcacatgttttgcttctatcaatgcaatatgtacantagtaaaatatcccacttatgggaagaagccttacggaggcactttgtgcatcagtcctcttactcccacctctgtgatcatggaagcccgtggcgcttg

SEQ ID NO: 1259 - DNA, 201 bp, Homo sapiens
  variation 101: note = n = A or C
  source 1..201: mol_type = genomic DNA
tgacatcaacccaactagtagcatagtttttgaattattagatgtgaatcaggcactatccactggacctttcaatctccaagagaaacagatttgttctntgaatgatctggttgtacatgttttccctttacactccttcaactcacagcatcctatattttctgtctttcattggcctcctcaatttaattataggct

SEQ ID NO: 1260 - DNA, 201 bp, Homo sapiens
  variation 101: note = n = T or G
  source 1..201: mol_type = genomic DNA
attagcagcatgagaacagacttatacaccaagtcccccagtttttcttcaattgttaacatgttacgtaactttagtacaattgttataattaatgaacnaatgttgatttagtattactaaagtccatatgttattagaacttcctttgtttttacctaatgtccttctcttattctaagatcccttctcaagttatga

SEQ ID NO: 1261 - DNA, 201 bp, Homo sapiens
  variation 101: note = n = A or G
  source 1..201: mol_type = genomic DNA
ttatcataattcacaatataaagagactttaaacaaacactgtcattttaatacttgcagaaaaatcatctgtaaaattaaacacttaattatttggtgtnttagaaagagaaggggactccctcaacttgataaaggcatttgtgaaaaataaatgaaaagctaagatgtagttaatactaaagacagatggatttctga

SEQ ID NO: 1262 - DNA, 201 bp, Homo sapiens
  variation 101: note = n = C or T
  source 1..201: mol_type = genomic DNA
actaattaatttattgttatcacaaagtagaattccattgtatgaaaatataattttaagattattggcagttattgaaatcttatttgtttccctttttnggtttattatgaataaagctgatgcaaatttctcgtggacacacattttcattttttcaggaaaacggtatcttggtcatgacatagaaatattttttat

SEQ ID NO: 1263 - DNA, 201 bp, Homo sapiens
  variation 101: note = n = G or A
  source 1..201: mol_type = genomic DNA
atgaccctcataatatgattcatcctgaggcaaatttctctccatctgtaaactgtaaaatgaaacaagttacatgcttccaaactgcaatgttgggacangcaaagcatagacatttccattataaaagggagaaataagcgagaagaaatgagtgataggtcccaagtaattccaaaacccaagagggcaagaagcatt

SEQ ID NO: 1264 - DNA, 201 bp, Homo sapiens
  variation 101: note = n = A or T
  source 1..201: mol_type = genomic DNA
ttctgattgtgctaatttgaatcttttttccttttttctttgataatctagctacctgtctatcaatcttttttatcctttcaaataacgtaacttttgcntttaatgattcttcatatggattcttgggtcttaatttcattcatttctactctcattttagccattcctcttcttctggtagttttggggttattttat

SEQ ID NO: 1265 - DNA, 201 bp, Homo sapiens
  variation 101: note = n = A or G
  source 1..201: mol_type = genomic DNA
gagagagcaagagaactgtccctaacttcctcaatttatattttagaggtgaacatttttttaaagtaaatattttaaggaagtatttatgcagaaaagtnaagcagagaaatgtcacagccaaagccagttatatgagtgtatatctggtattggagaatgacattttataaatgataatgggagaagacctcactataa

SEQ ID NO: 1266 - DNA, 201 bp, Homo sapiens
  variation 101: note = n = C or T
  source 1..201: mol_type = genomic DNA
aacttcattcaccttcttaaagtttctagtcatctccacttatccccgcagaggataccttccaagacttgcagtgaatgtctgaaaccacagatagtatngaatttgattgctgtcaatcagaacatgtttttcatgtcttccacccacaaacataacgctttttccatgttaactaagcattattcctgcaccgtggct

SEQ ID NO: 1267 - DNA, 201 bp, Homo sapiens
  variation 101: note = n = T or G
  source 1..201: mol_type = genomic DNA
cagatggaggcagtgagatcccagtgaaccagcctaagccaatcctctacagatggcaatataaggtttttctatttattccaagaacagtgggaagccanggaatttttctaagcagagtagtgacaagatctgcattctcagccaatcactgtgactgcagaatggaggacaaatttgcatgagggtggagtgactgtg

SEQ ID NO: 1268 - DNA, 201 bp, Homo sapiens
  variation 101: note = n = G or A
  source 1..201: mol_type = genomic DNA
gaatgtttagaacgatgtaatcaactgcttgctattttcctgaagtctccaaagagagtgacttccaagagtacagatgttccttgacttatgcggctacntcttgtaaacccatcgtgagccgaaattatcataagtagagaatgcatttaatactcctaacctactgaacaccatagcttagcctagcctaccacaaac

SEQ ID NO: 1269 - DNA, 201 bp, Homo sapiens
  variation 101: note = n = C or T
  source 1..201: mol_type = genomic DNA
aaagaaatggaaggtttaactctttgagatgaatgcatgtatcacaaagtggttttacagatagcttcattctaatttttatcctgggttattttcacttntgccattgtactcagggaattcccaattgtccattcccacaatggactaaaacactgtttccaaactgctgaatccaaagaaagttttaacatggtgagg

SEQ ID NO: 1270 - DNA, 201 bp, Homo sapiens
  variation 101: note = n = C or T
  source 1..201: mol_type = genomic DNA
tatcccgtttccaatgaaggccacagagcattccaaatatccacctgcagattctacatagcgtgtttcaaaactgctctaccaaatggaagtttcaactntgtgacttgaatgcacacatcacaaagaagtttctgaaaatgcttctgtctagtgtttatgtgtatatgttcccatttccaatgaaggcctcaatccggt

SEQ ID NO: 1271 - DNA, 201 bp, Homo sapiens
  variation 101: note = n = T or A
  source 1..201: mol_type = genomic DNA
tcaaaaacgaaatatcttaacataaaaaccagacagaagcattctcagagacttctttatgatgtgtacatccagttcagaggtgaacctttcctttgatngagcagtttgaaaacaattttttttattatactttaagttttaggatacatgtgcacattgtgcaggttagttacatatgtatacatgtgccattcttgt

SEQ ID NO: 1272 - DNA, 201 bp, Homo sapiens
  variation 101: note = n = T or C
  source 1..201: mol_type = genomic DNA
tgcacacatcccaaagaagtttctcagaatgcttctgtctattttttatgtgaagacatctccatttcagcaataggcctcaaagcgctccaacaatccanttgcagaaactacaaaaagatttttttcaaacagctcaatcaatagaaagtttcaactctgtgagttgaatggacacttcacaaagaagtttccgagaat

SEQ ID NO: 1273 - DNA, 201 bp, Homo sapiens
  variation 101: note = n = G or A
  source 1..201: mol_type = genomic DNA
ataggccaaaaacggctccaaatatccacttacagattccataaaaagaaagtttcaaaactgctcaatcaaaatatatgttcaactctgtgaatggaccncacacatcacaaagcagtttctcagaatgcttctttctagcttttatgtgaagatattttcttttgcaccataggtcccaaaacgcaccaaatatccact

SEQ ID NO: 1274 - DNA, 201 bp, Homo sapiens
  variation 101: note = n = G or A
  source 1..201: mol_type = genomic DNA
actcacagagttgaatgcacacatcatgaagaagtttttcagaatacctctgtctagttatttgggaagatatttcctttttcaccgtatgaattaaaccnctcacaaatatccctctgaagatactacagaaagactgtttccaaactgctccatcaaaagtatcgttcaattctttgagatgaatgcacatatcacaaa

SEQ ID NO: 1275 - DNA, 201 bp, Homo sapiens
  variation 101: note = n = G or A
  source 1..201: mol_type = genomic DNA
tgtgtcatttggatttaccaattgtagcagatggctaggatgaatccctttacatacttccggcaccctgattttagctcagctttcgattgacagttctntacgcactgccaggacccctatcaagttgccatgatgtttttgctttgcaccacaaggctttccctagagccaaggaagacagatcagccgtttagaggt

SEQ ID NO: 1276 - DNA, 201 bp, Homo sapiens
  variation 101: note = n = G or A
  source 1..201: mol_type = genomic DNA
cagattaaatatagaggcagacatgagaatccagctgaatttacctaagctagacattaaaaagatttgcaaaaatgtaaaacaatgtcacttttctcacnaatacaaataattttttgtttttgaaaatattgtcacttttcataaaaatatgttatgggtaatgtaataggtttgtcgttgttatttgacatgaattaa

SEQ ID NO: 1277 - DNA, 201 bp, Homo sapiens
  variation 101: note = n = G or T
  source 1..201: mol_type = genomic DNA
ctgtgggattatctaagagtgtggcctggtatttgcccagcctgccctagtgtccaccaatagcctcccttttgttctagtaacactagcacctggcgagncacatagatcatgataggctgtctcacagtcaacgtttcagcttcctttaatagcaggcatgtggcagcgactgcccttaagcaaaggggccagactttg

SEQ ID NO: 1278 - DNA, 201 bp, Homo sapiens
  variation 101: note = n = T or C
  source 1..201: mol_type = genomic DNA
agctgagcttggtctgctttttctctctgctctaacaggacagaactgagttcaaagcctcacacttactctgctctctctcccccagcacccagagacantctacataccatgctgccaatgccagaggttagggaggggtgatattggtgactcagaactgcttcttctatctcttcagtgcctctttcagtgatataa

SEQ ID NO: 1279 - DNA, 201 bp, Homo sapiens
  variation 101: note = n = C or T
  source 1..201: mol_type = genomic DNA
aatctttgcttcttctctgaaaggtgaggtctcatttctcttcccttgaatgaaaaatgtgcttggtgatttgcttttaataaataaacagtggtggaagngacagtatgtggcttccaggcctagatcatacaaggcattgtgtctcccttgcactctcttcagatcgtccactctgggaggagccagctgtcatgttga

SEQ ID NO: 1280 - DNA, 201 bp, Homo sapiens
  variation 101: note = n = T or G
  source 1..201: mol_type = genomic DNA
ggaactggagcaaaggtgactctttagcaacgagactggcagcattttgctcctgccctagagatttgtggaactttgaacttgagagagatcatttaggntatctggaaatttctaagcagcaaaacatttacaaggtgacttggatgctattaaaaagcattctgttttaaaaaggaaatagagcaaaaaagttcagaa

SEQ ID NO: 1281 - DNA, 201 bp, Homo sapiens
  variation 101: note = n = A or G
  source 1..201: mol_type = genomic DNA
tgtttgtgacagtaaaaagttggaaggtcaaaaatatctaatgatgaattgttaaattaagtttggcacataatgagactggaatattctgtgattactanaaactgaaaatgacatatacttattgacatactttactagataaaaaagtctgtttacataaaagtatgtacagtataattccaattttaattccctttc

SEQ ID NO: 1282 - DNA, 201 bp, Homo sapiens
  variation 101: note = n = T or C
  source 1..201: mol_type = genomic DNA
tgttgggctaagtactgtggctcaggcctgtatattaatgtttatatctttttaaaaataattcaaggacttacagacatctctgtctctggtcatgctcnttattctggctcacatggcatttcaattaaatgtcatagttttatctttttcccctttatattttaacatattagtcattcttattgctgttttttatag

SEQ ID NO: 1283 - DNA, 201 bp, Homo sapiens
  variation 101: note = n = C or T
  source 1..201: mol_type = genomic DNA
tcacagatcaaatctagcccaccttttgttttacgagaataaagccacactcatttattgctctcttgtttatggctgctttcatgctataacaccaaaancgaatagttgtaatagagaccttatgacctccaaaggctaaaatatttactatctggtattatgcagaaaaaaaaagtttgctgatccttgatctagaag

SEQ ID NO: 1284 - DNA, 201 bp, Homo sapiens
  variation 101: note = n = G or A
  source 1..201: mol_type = genomic DNA
ttgaatatttatgttccctcaaaattcatatgttgaaaccctgactccaatatcatggtattaggatatgggacctttcagaggtgattatgtcactcganggtggggcctgcctgaatggaatgagtggcctcaaaaaagaggcacaagggggctcgtttgtcccttctgctatccagaaacacagcaaaaaaaactgct

SEQ ID NO: 1285 - DNA, 201 bp, Homo sapiens
  variation 101: note = n = T or C
  source 1..201: mol_type = genomic DNA
agaactagctgcaaacagactctagcaacttatagatgaaacctgaatgaattttcctcattatcatgctaaagcttccacgctgggagaagctatggctncattaccgaaacttgcgacctacctgctggcatgtgtcactatacttcgtatgtgctcctgtccatgcgatgatgcaccctctcccctctccatcaccag

SEQ ID NO: 1286 - DNA, 201 bp, Homo sapiens
  variation 101: note = n = T or C
  source 1..201: mol_type = genomic DNA
cctaagaaccagactagtgattgttattactcttctgggtctagccacccagtgaggctaccaggctccaggttgctgctgaggaacttgtgcaaagagtnctgtgatatgacctgtattcaggtctttcagcaatcgataccagcacctgttctggtataggtggcatgggagtgatgtgagagtccttagttgtagatg

SEQ ID NO: 1287 - DNA, 201 bp, Homo sapiens
  variation 101: note = n = T or C
  source 1..201: mol_type = genomic DNA
acaagaagttcaggggcaaggattccagagctgcttgggcagctcaaggaggtcatcagggaccgagtttctttccatcttcccgctctggtatctttaangtgtaggtttttgtcctcatgcttattggatcagagtcacaggatggctgctgaacctgtacaaaagaatcctgtatgttttccaggcagggaaatgcaa

SEQ ID NO: 1288 - DNA, 201 bp, Homo sapiens
  variation 101: note = n = T or C
  source 1..201: mol_type = genomic DNA
atcgaatcagtaacaaaaaccctaccaaccagaaaaggccctggaccagatggattcatagctgaattctaccagatgtataaagacaagctggtgccacncctgctgaaactattccaaaaaactgaggagaaggactccccctaattgattctataagtgcagcatcattctgataccaaaacctggcagagatacaat

SEQ ID NO: 1289 - DNA, 201 bp, Homo sapiens
  variation 101: note = n = A or C
  source 1..201: mol_type = genomic DNA
atagaactgacaaatggcctatctagtttttataggatttttatgcatttccaagagaggagaaagtaattacaattacaaatgtgaattaaatgctcagngaaaaaggagggaaggaaaatctcctttttttgaaatacgaagacttaattttcttatttttagtttgtatttgttcttacacatacacctgacatggat

SEQ ID NO: 1290 - DNA, 201 bp, Homo sapiens
  variation 101: note = n = C or T
  source 1..201: mol_type = genomic DNA
ggggctctgcaatcagtaggtggtaaagccattcaggtctctgtccttcccttcagggaagtgaggtctgccaggccccaggtgggtccagaagtgtcatncgggagtcagggactagagtacaaaatcttagaagtatacctggtattctattgtattgcagctcagctggcacttaaactacatggtgcagttcttccc

SEQ ID NO: 1291 - DNA, 201 bp, Homo sapiens
  variation 101: note = n = T or C
  source 1..201: mol_type = genomic DNA
aaggttaacctctgaaagaaaaagaaacagttctttaaatttaaatgtttctgtctttacttttgctaaaattgtgattaatttcttaaatttctgttttnttcactagaatgtagtcttttagagggaagaaatgatgtcatattcatttttgcattgttacccttgtttaacccagcaatttgcaaataatagctattt

SEQ ID NO: 1292 - DNA, 201 bp, Homo sapiens
  variation 101: note = n = C or A
  source 1..201: mol_type = genomic DNA
atttcccttcactttgttgtgctccacagatactgtgtttttacaaattgaaggtttgtggcaatctcgggtcaagcaagtccatcggtgcaatatttccnatgacgtgtgcactttgtgtctctgtgtcacattttggtaactctcgtgatacttcaaacatttcattattattatatgttgtggtgatctgtgatcagg

SEQ ID NO: 1293 - DNA, 201 bp, Homo sapiens
  variation 101: note = n = C or A
  source 1..201: mol_type = genomic DNA
cacacaaacaacaaataatttttaatacaattaagtcctaaagattgaatgaggtattcttattctaaaaaaaatttatttttaactgaaattcacatttnactgggcatccaatatcttacctggcaaatttaaatgttactccatcctccaaggagtttttggcagagctgaataaaaagaaaaggactctcttgaaac

SEQ ID NO: 1294 - DNA, 201 bp, Homo sapiens
  variation 101: note = n = T or C
  source 1..201: mol_type = genomic DNA
caggatgacataaagtcatgaaaggttaaatagaaaagtgatagaagagaaaaatgagatttttacaaatgccaagttcaaaggaggaaaatccactgtgnctcagcactgtgagggaaagtttcttgagggaagtagtgcaggcaaaggccttgaagattgggagggacatgataaactcagcacctgccatcgtgtcag

SEQ ID NO: 1295 - DNA, 201 bp, Homo sapiens
  variation 101: note = n = C or T
  source 1..201: mol_type = genomic DNA
ctgtgactctacattagagatcactgtacattagagaccacaatatcttaaattgagaaaatattctccctatagatcctgaggtaggaaaaaaactctgntgaatgaagaatttcaatgtagatgttctcatttctattttttgtgtgttgaaatacaaaaatatttcagataaaatactttcacaggtcctgtcttttg

SEQ ID NO: 1296 - DNA, 201 bp, Homo sapiens
  variation 101: note = n = C or T
  source 1..201: mol_type = genomic DNA
accactgttatgggttcaattatgttccttaaaattcatatgttgacgtcctaaggcccagtacctcagaatgtagccttatttggaaacagagtcattgntgatgtaatgagtaaagttaacatgggccattagggtggagcctaattcaatatgactggtgatgactggtgtccttactaaaaggggaagtttggatag

SEQ ID NO: 1297 - DNA, 201 bp, Homo sapiens
  variation 101: note = n = T or G
  source 1..201: mol_type = genomic DNA
cccacagtcatcagctctgctcattccccatcactttacattttctggataatattttttctatttatgtgtgtattaatgaattgcttgtatcctccacntgaatgtacaatcaataaggtgtaaactcacccatctttttcaatattgaatcctcagttcagtgcacatagtagtcacttagtaaaccttatttattgt

SEQ ID NO: 1298 - DNA, 201 bp, Homo sapiens
  variation 101: note = n = T or A
  source 1..201: mol_type = genomic DNA
tacaaatgtattattggtagaaaaaactgaccaaaaacaatgaacattataaagtaaattatgtaggatgttaagaggtgatgagtactatagagcaaatnaaagacactcacttgagcaaggtaaagggaagagaatgctggggtccagcaggtcaggttacagccttatatattctcattgaggaaatgaaatctgagc

SEQ ID NO: 1299 - DNA, 201 bp, Homo sapiens
  variation 101: note = n = A or C
  source 1..201: mol_type = genomic DNA
ttcctcactgctctgcagtgacacttggacataaatcaaatagccatgtactgtgtagctctgcttctgttatgcccaatcattgaatctgaatccaatanattctttagatctaactatcaatttgtggaaaatacaagagagagaggagcatgttaagtgacactccagaaaggccatcagcaaaagctaagttaatgg

SEQ ID NO: 1300 - DNA, 201 bp, Homo sapiens
  variation 101: note = n = G or A
  source 1..201: mol_type = genomic DNA
caactggtcgaacatggtggaaataacagagcatggttttcaaaaataggccgtaaaaagccttgcagcttccacctgggtatcttgggatgttcccttcnaacccagctgccacgccaagagaaatccaagccacatggagaggacacagttactggaattggcagcctcagctaaactcctagccagcagccatgtgag

SEQ ID NO: 1301 - DNA, 201 bp, Homo sapiens
  variation 101: note = n = T or C
  source 1..201: mol_type = genomic DNA
cataggaatccagtctcattcttcagccatatgaatggactattgtccagacaatatcttttgtcactcatcttcaattccactttggcataaaccaagtntctttgtttgcatgggtctgtttctggtctctctattctttcacactggtatattttcctattcttgcacctgtacacactttcttacttgtcatagctt

SEQ ID NO: 1302 - DNA, 201 bp, Homo sapiens
  variation 101: note = n = C or T
  source 1..201: mol_type = genomic DNA
gtgtggtagagcagaaaaaacagtggtcataggcattgcaatttcatggaccaatgctttaaaaaaaaatggtaagggctggcaactactgtggtctgaangttggtatctccctcaaatgcatatgttgaaaccctaacccccaaagtgatgctattaggagatggggcctttgggagatgattggactgtgagggtgga

SEQ ID NO: 1303 - DNA, 201 bp, Homo sapiens
  variation 101: note = n = T or C
  source 1..201: mol_type = genomic DNA
tttattgagaacatactatatatgagggatagggctcattgctttaaaaatggtatttctaattctcacaacaagcctacagggtgatttgattactactnccattttacagctaagcaaaataaggctcaaggtcacttgaggacctgaacttgagctgctagaccctaaagaagtgtactgattatttagcaccatttg

SEQ ID NO: 1304 - DNA, 201 bp, Homo sapiens
  variation 101: note = n = A or C
  source 1..201: mol_type = genomic DNA
tgtggcccggttcctaacaagccacacactggtactagtttgcactccatgggttagggacccctggtttaggccagaagggccccacccttatgaattgnttaacactattgtaaaacggcttgatgaggacgtttggtcccttttacctttccagcccttctgccacgtgagaacacagctttcctcttctctggagga

SEQ ID NO: 1305 - DNA, 201 bp, Homo sapiens
  variation 101: note = n = A or C
  source 1..201: mol_type = genomic DNA
acaacaattagaatttgggtatgcagagatgggaggaaatggggagcagatacggactagacagtccatgtggaggaaatagcttaagcaataagctcaantaatataccaactaaaataataataataacaataagctttgtatttcagaatttattgtcctaggaattactgcacaaaatcggagctgaagtatgtccc

SEQ ID NO: 1306 - DNA, 201 bp, Homo sapiens
  variation 101: note = n = C or T
  source 1..201: mol_type = genomic DNA
ttgttagatatgacatcacaaacttgattaccgaggacaagaaaaaataattgatacaattgaattttatcaaagctaaaattttttggtatttgaaagangctattaagagaatgaataaaggtgatatttctaccttcatcagatgaaaaggtgatcaacatcattattcattagagaaatgcaagttaaaaccatgat

SEQ ID NO: 1307 - DNA, 201 bp, Homo sapiens
  variation 101: note = n = G or T
  source 1..201: mol_type = genomic DNA
ggagcttttttttttaaaaaaaataccatcacctgggccccagtccaaagtgaatcaaaatctctggggggtagcattctggcattggtattgttgaagcngttctcctctccaggtttttctaatttacagcaagattgtgaaccatcgttctaatgagaatttaatcgaccctaagagaggaaaatccacacgttgaat

SEQ ID NO: 1308 - DNA, 201 bp, Homo sapiens
  variation 101: note = n = C or T
  source 1..201: mol_type = genomic DNA
tttaacaaaacaaaacaaaactaagattggaacatgctttgagtttgttcttgtattagtttttccttaagttaattgtgaacatttccacattgttaagnactttttcagaaacataatttttaatgaggataccataaattgcttagtccttcccccattcttgaacattgtggttgttcagtattttgctattatgaa

SEQ ID NO: 1309 - DNA, 201 bp, Homo sapiens
  variation 101: note = n = C or T
  source 1..201: mol_type = genomic DNA
gtagggctctgtgtcctggaccatgaagaaaggcaggcttgtagcttatctgcttcctcttggtcccaccagctctactccttttgcctaattaggatgcnacagcttttaccagcttgagtgcccctcttttttaatttttattttttgagacagggtcttgctctgttgcccaggctggagtgcagtggtgcaatcttg

SEQ ID NO: 1310 - DNA, 201 bp, Homo sapiens
  variation 101: note = n = C or T
  source 1..201: mol_type = genomic DNA
agaaaccattttgtgaggtgtgcatttatctcaaagagttaaaccttttttttttcattcagtagtttggaaacactgagtttgtaggatcggtgaggganatttaggagtattttgtggcctgtggtgaaaaagaaaatatcttcagataaaaaacagaaagaagctttccgagaaactgctttgtgatgtgtgcattca

SEQ ID NO: 1311 - DNA, 201 bp, Homo sapiens
  variation 101: note = n = A or G
  source 1..201: mol_type = genomic DNA
atttctgatacatttattaaaacaacctacagaatgagagaaaacattttcaaactatgcttccaagaaaagactaatatccaaagtatataaggtattcnaataatgcaacaagggaaaaacaacaccattataaatttggcaaaaggacacaaatagacacttttcaaaagaagacatacaagaacccaaaaaacatat

SEQ ID NO: 1312 - DNA, 201 bp, Homo sapiens
  variation 101: note = n = A or G
  source 1..201: mol_type = genomic DNA
gatatggttcctaatatccaggggagaagaggatgatattactccaaatatcgcaggggatgtacaccctctgtgaatttgtttctaatatccagtggtanagttgatgatagtactcccaatactgtacaagatgtaaacattttctgtgatattattccttatattaaggaagagagactatcatatgacttccaatat

SEQ ID NO: 1313 - DNA, 201 bp, Homo sapiens
  variation 101: note = n = G or A
  source 1..201: mol_type = genomic DNA
atcctaggaatgattgttattgcttttttgtagagtaactatttatttatattcattccaaataattaaaatttcactgtttttctattcccttctgcatnattggcattccagttgggatttacttcttatcaacagaaagcaagtctttattatttcttttaatttatctctagtaataaattcaggatgtttttgtta

SEQ ID NO: 1314 - DNA, 201 bp, Homo sapiens
  variation 101: note = n = A or G
  source 1..201: mol_type = genomic DNA
atacctaaaactctcctactttgctgacgggagtgcaaaactacacagccactttggaaagcagttttgtagtgtcttgcaaaattaatatacactgaacncgtaactcagtagtccactccaggatatttgctggagatgaaatgaaaatatatatttacacacacaaatctgtacttaaatgtttgcagaagctttatt

SEQ ID NO: 1315 - DNA, 201 bp, Homo sapiens
  variation 101: note = n = T or C
  source 1..201: mol_type = genomic DNA
attcatgaatatgagatgattttccatttgtttatgtcatctataatttatttcatcagagttttgtagttctccttgtagagctctttcacctacttggntgattgtattgctaaatatctttttttttaacttattgtgaatgggatttagttctttgtttggttcccagctttaccataattgggtgtatagaaatgc

SEQ ID NO: 1316 - DNA, 201 bp, Homo sapiens
  variation 101: note = n = C or A
  source 1..201: mol_type = genomic DNA
gaaaatctgcaacatatgcttgcactctcactcagaccccacactctgacactggaggatggcagctgtaagtgaacccatttttaagccacctccttatntctgtgatttagagagacttgggaatcgagaaccacttcaactcccagagctaggtcatttagaaaccagtatctctggtggcagttttaaaagttgggg

SEQ ID NO: 1317 - DNA, 201 bp, Homo sapiens
  variation 101: note = n = A or G
  source 1..201: mol_type = genomic DNA
gtaatgtacaacaaagttgttggttgacagcatgtttgtaaaatgttatataaatttgattatttttattgtctccttacactgtcaaatctgtcattctntagacataagttacgtaatcaccagttttaggatttgacattttcttggaaacctggaagccacccttgtttcactgttggtgaagactggcttgcttca

SEQ ID NO: 1318 - DNA, 201 bp, Homo sapiens
  variation 101: note = n = T or C
  source 1..201: mol_type = genomic DNA
cttctttagaaggaaaaacccactagaaagttatcttttgctctcaaaatctgagaaatcttacagcttacttagtaatatccacatagcttacatgctcnttttaaaatctaaagaggcctaacaagtaccctatcctactggtaggagatacaaatttggcttcttttattttactatggagaagacatattgatacac

SEQ ID NO: 1319 - DNA, 201 bp, Homo sapiens
  variation 101: note = n = G or A
  source 1..201: mol_type = genomic DNA
actattactctttatgctttcatagcccctccacttatacctgttctgattctcaaatcaatatgtttatctagacttctcctctgagcctcatattccanctcttttctgtttatcttcacctaaaaagggatttgagtatctcaaactcaacatggttacaactgtactggtcataaattacccacaaaccttccctag

SEQ ID NO: 1320 - DNA, 201 bp, Homo sapiens
  variation 101: note = n = G or A
  source 1..201: mol_type = genomic DNA
ttagaagacaatgaagcacaaataagtcaaataccatgcccaaggtgatgtagccagtaagcagcagagtcctaattcaaactaggtggttgtctcctgantaatgaaagttgattagggctttctttttactataaaagcattgtttttattttttctttttatcatgggagatgccattcattcaatgagacagtctta

SEQ ID NO: 1321 - DNA, 201 bp, Homo sapiens
  variation 101: note = n = T or C
  source 1..201: mol_type = genomic DNA
taccactgtattattggcacttcttcctcagtacacaactgacggaagaggtaatactgtaaggttgcttcacagatggctcagctctgtatggggcatangccaaaatgaagtactgctgcattatgatattactcagtgaggtccttgaaatacatcagtaggtcagttattccaaagggaagtgctttgggtagtaca

SEQ ID NO: 1322 - DNA, 201 bp, Homo sapiens
  variation 101: note = n = A or C
  source 1..201: mol_type = genomic DNA
agcatcttatttgctcagagagaagagaatatatgtgaccttcaaagtgtctatttaaagccactttacatttatttagcaaatattaatgcaattagtangtgctaagcatcactttaagcattttatgaatattaatgcaattaatcttttaaaaaccttgggagataggtattatttccccctttacagttggggaaa

SEQ ID NO: 1323 - DNA, 201 bp, Homo sapiens
  variation 101: note = n = C or T
  source 1..201: mol_type = genomic DNA
gaatggcatctcattgtttacattttattatcaattgggctgagagcctttttcaagtgtttattggccatttgctattcctcctcagtttccatccatcncttgcccattttttattgagttttcttttccttattgatttgaaggagttctttaagtatttttagatactaattatctattcgttttattgatgtaaca

SEQ ID NO: 1324 - DNA, 201 bp, Homo sapiens
  variation 101: note = n = C or T
  source 1..201: mol_type = genomic DNA
tgtttgtgtccccgctacctccacaaaattcatgttgaaatcctaaccctcatagcgattatattagggatggggcctttggggaatgattaggtcttgcntgtggattagggcccttaaaaaaagacacaagagagttttacttcagctctctctgctcttacaaccatgttataatacaatgagaagtagacgatctgt

SEQ ID NO: 1325 - DNA, 201 bp, Homo sapiens
  variation 101: note = n = G or A
  source 1..201: mol_type = genomic DNA
taaatagtaagacttgaaagttgaaattactccttgatccatggtcagtataatgaatgttgtgttagcaagcatggaaacaatgctaatctctttgtacntcaccttcagaaggcatgagtgaccaggttcattgtcaataagcagttatatttcaaaaggagtctttttttccaagtagtgggtgtccacagtgggctt

SEQ ID NO: 1326 - DNA, 201 bp, Homo sapiens
  variation 101: note = n = C or T
  source 1..201: mol_type = genomic DNA
aattgtttaactctataaaataaatattactattgcaatttattagatgagaaagtgattctcagattgctgaactaatttgtccaagatctcacaaaaanttattggccagaaacaaacctatgtgtgtctttctaagcaattgaaatgcttttgtcatgatatgcttcagcaagaagaacattttcatcacaggacctt

SEQ ID NO: 1327 - DNA, 201 bp, Homo sapiens
  variation 101: note = n = C or T
  source 1..201: mol_type = genomic DNA
tattttgtctgtatttgcctgcttccaatacctatcttatatttttagactttctgaatcacgttgttctaagggtatctttttcatatagcacatagtangattttgctttctgaaccaatcggaaaacatttttctttacaaaggaacttaaagttaagcccatttgaatttactaatatatttgatttgctcagtttc

SEQ ID NO: 1328 - DNA, 201 bp, Homo sapiens
  variation 101: note = n = C or T
  source 1..201: mol_type = genomic DNA
gctccccaaagaaccacagctcttctctccttctcatcaccacaacatggcgagcagaggggcatgtttcagccctgtttgtgttacagctttttcggtcntgcaatttggcaggtcccaagttcttgtcctacatccaggaagaatgaggtatatggacaactggagggtaagcaaggcagagaatagcttcattgaatg

SEQ ID NO: 1329 - DNA, 201 bp, Homo sapiens
  variation 101: note = n = C or T
  source 1..201: mol_type = genomic DNA
tggtttctctgaacaggtcaagtatcctgttgtagactctcataacccctctgtacagcaccctgatagcactcatcatagtcaacatttgctttatgttngccccaccacccccagtaacactgctagatccgctaggacaggactgtgtattattgctgcttattctgtcaccagtgtctagtacacggcctgccatac

SEQ ID NO: 1330 - DNA, 201 bp, Homo sapiens
  variation 101: note = n = G or A
  source 1..201: mol_type = genomic DNA
ttacagtaaggcttgtaattagatatagaaggtcctccaaatttgttcaagattgttttgatatttgtatttccatataaattccaaaatgaatgtgtcantaccctccaaaaaatgtctggaacattttgggtattgcattgagcctgaagatgtgaaataaacatattagcattattgaatcttatacttcatttgcat

SEQ ID NO: 1331 - DNA, 201 bp, Homo sapiens
  variation 101: note = n = G or A
  source 1..201: mol_type = genomic DNA
ctgaaaattagattaagaacattttatttaccatagcattaaataatacttagaaataaagttaacaaaagaagtgcaataattttattataaaaaccacnaattattgttgaaagtaattaaaaaagatataataaattgttcaaaatctcatgttcatggatcagaagacttaatattgttaagatggcagtgttttcc

SEQ ID NO: 1332 - DNA, 201 bp, Homo sapiens
  variation 101: note = n = T or A
  source 1..201: mol_type = genomic DNA
ttctctagagaaacaaaaccaataggaaatagataggtagataagacaaatggacagaggagagacagagagagagagagagagaatttgctatcatggantggctcatgtaattttggaggctaggaagtcccaggatctgctgtctgcaaactaaagacccaggaaagccaatggtgtaattcagtctgaaggccagag

SEQ ID NO: 1333 - DNA, 201 bp, Homo sapiens
  variation 101: note = n = G or A
  source 1..201: mol_type = genomic DNA
ctttcaagccaaattatttaaaattctaatccagtccttacagacaagtaattaggaaatcctactggctctgagaccttcacaaatatatccagaatctnacaacactccacctgttctcccacctctctgacccaagccactcacctcccacctggactactgtggcagtttcctgtctggaccctctgcttctccctt

SEQ ID NO: 1334 - DNA, 201 bp, Homo sapiens
  variation 101: note = n = C or T
  source 1..201: mol_type = genomic DNA
cctccaatgcttgaatgttgtgacaccactgattgacacaaacccagctcaggcctcaggaagagtagggggagacaagccaagtcacaatccaaattagngcagccgctcctgcagcaaggggaacacaatgtggtctttgactaacctttcaatgccctgtgtagcttgagccctgagggcggtgccgagctgacagcc

SEQ ID NO: 1335 - DNA, 201 bp, Homo sapiens
  variation 101: note = n = T or G
  source 1..201: mol_type = genomic DNA
ctactctatgacccagcaatctcacttctgggtatacatccaaaggaaataaaatcagaatcttgaagagatatctgcactctcatttaattgcatcattntttccaacagtcatgacatgggagcaacctgaatgtccattgactgatgaatggatgaaaaaaatatgggatatacatccaaaaaagattattcaggctt

SEQ ID NO: 1336 - DNA, 201 bp, Homo sapiens
  variation 101: note = n = A or G
  source 1..201: mol_type = genomic DNA
gaacacttctcaatgcttagttcaaatataaagataatagaaaactcccagggaacagaaccaggggccacagagaactattgacaagataaataaagccnaagcagaatcaaagcaatggatgtcttccattgctaaggcaaggggtctatattgtttcttcctgcgaagatttcttatggctgcagaccacggctgcta

SEQ ID NO: 1337 - DNA, 201 bp, Homo sapiens
  variation 101: note = n = A or C
  source 1..201: mol_type = genomic DNA
acctatcattgtgttccaattgcctacagtatttagtagagtaacatgctgcacaggtttgtagcctaggaacaataggctgtaccatagtctaggtatgnggtaggcttgatcatctaggtttgtgcaaatacatattatgacgttcacacaaccacaaaatgcctaatggggcattctcagaatgtattcctgtcatta

SEQ ID NO: 1338 - DNA, 201 bp, Homo sapiens
  variation 101: note = n = C or A
  source 1..201: mol_type = genomic DNA
agaaatccaagaagattggagtatactgcttagccaaggtttccagaaaccaaacaagctaacatttctatggaaataaaacaacaacaacaaaaaaaaancaggttaatgaatataactcagtctgtgtgttcagaaggcagttagtcaagaaaatgttaagatttgagctcaaagcatattttcctagtttgcagtctg

SEQ ID NO: 1339 - DNA, 201 bp, Homo sapiens
  variation 101: note = n = A or G
  source 1..201: mol_type = genomic DNA
tggagcaacgtcagttgatttaggaatttacgaatagttagatgtgaagagcatagcaattgcatttggaaaatgatataacagtatctattaaaactaantatatacataacctatgacctagcatttcttttatttttttatttttattattattattttttgagacagagtcttgctctgttgccaggctggagtgca

SEQ ID NO: 1340 - DNA, 201 bp, Homo sapiens
  variation 101: note = n = C or A
  source 1..201: mol_type = genomic DNA
tttttttcctaacaaaagggtctacagtaactggctgaaatagtccttatgccagaaaggcatattttggagactaattcagctacacaggctgcttcttnacccaatctgtgtttctttaactagattactgagttcagggtggagctcattaataagtagggcaaacagagcattttctattcctggactcagcatgga

SEQ ID NO: 1341 - DNA, 201 bp, Homo sapiens
  variation 101: note = n = G or T
  source 1..201: mol_type = genomic DNA
attaatcaagaatggggggaatgaaagtaaatcaagcttgcagcacatgcactgttaatgattaggtcagccttctctctctgacctgcttcctcgtactngcttggtgcctattgccttagaatcacatagactcagttacaagattattgttccccttaactgctctatagatagcaactcgaacattataacatgtta

SEQ ID NO: 1342 - DNA, 201 bp, Homo sapiens
  variation 101: note = n = A or C
  source 1..201: mol_type = genomic DNA
tccttctaattgaacttttgtgttttttgaccagcacgcttcccaacccttcttcccatccccaacacctggtaaccaccattctattctctgcttccatnagttcaattttgagtccatatatgtgtgagattatgtggtaactgtctttctgtgcctggtttatttcacttaactgtaaaccaaaaataaaatttgaag

SEQ ID NO: 1343 - DNA, 201 bp, Homo sapiens
  variation 101: note = n = C or T
  source 1..201: mol_type = genomic DNA
gagactttgttaagctgggatcctattggagtggtgcaggcctttaatccaatctgaccgggattcttatcagaagagacacagggagaatgccgtgtatngataaaggcagcgattgatgtggctagaaatcaagcattgccaggactacaggagaaacgaagagaaaggtatgaaacagattcttccctagagacttca

SEQ ID NO: 1344 - DNA, 201 bp, Homo sapiens
  variation 101: note = n = C or G
  source 1..201: mol_type = genomic DNA
tgcctctccttctgccatgattgtaaatttcctgaggcttccccagccatgtggaactgtgagtcaattaaacctctttcctttataaattactcagtctngagcagttctttataacagtgtgagaaagggctaatacaccactgcatggcagctggcatcaattactctcatggctactgcaggtaagtaaatgcttcc

SEQ ID NO: 1345 - DNA, 201 bp, Homo sapiens
  variation 101: note = n = G or A
  source 1..201: mol_type = genomic DNA
taactctgtatgaaaagcttgattcatggacaaacaaattaaaactaaaaaaaaagaatattgagatagaattgaaattcacctctccgttatattctaangatggacaaaaattgtcttgatgtttgaaatgcttgaatctcgaatttcaaatcaatccattgactttttttttttttttaccggctgcaaagtttttta

SEQ ID NO: 1346 - DNA, 201 bp, Homo sapiens
  variation 101: note = n = A or G
  source 1..201: mol_type = genomic DNA
ttccctggtagaaccagcagaaatgcagatgcagtttggaatggctgagatgttatgttgaaggttttctccttatgaaaagaggatgcctttagttcacntttttcaaagcatgctcacagatagcaccttatttcaaatcacacttttgtacagtgagctgaaagtgcttttttctcttccttttaaaaataagggaga

SEQ ID NO: 1347 - DNA, 201 bp, Homo sapiens
  variation 101: note = n = C or G
  source 1..201: mol_type = genomic DNA
agaaaagcataatgtaatggttgagatggagctataatgtctgaacttcaagtgattctcctgggctcaagtgatcctccatctccagcgtcctgaatagntaccactacaggtggttgccaccacaaccgtctaatttttttaaactcttttttttttttaagagatagagtcttgctttgttgcccaggctggtcttgg

SEQ ID NO: 1348 - DNA, 201 bp, Homo sapiens
  variation 101: note = n = T or A
  source 1..201: mol_type = genomic DNA
aagacccgccccatgattcatttacctcccaccgggtccctcccacaacagcggggaattatgggagctacaattcgagacttgggcgggggcacaggaangccatatcaatgctatttccagatagcatgttctctttctaaaagacggtgccaatcaagatcctggcaagaaatatatggcacattcaaataggtaatt

SEQ ID NO: 1349 - DNA, 201 bp, Homo sapiens
  variation 101: note = n = A or G
  source 1..201: mol_type = genomic DNA
ttagtaagttctaaaaagcaaaagccacaaaatcagaaagtgacaaatgggagttaattaaactaaagaacttctgctcagcaaaagaaccaagaaaaacngttaacagatggcctacagaatgggtgaaaatatttacaaactatgcattcaacaaaggtctaatgcccagaatctctaagaaacttaaagaaatcaaca

SEQ ID NO: 1350 - DNA, 201 bp, Homo sapiens
  variation 101: note = n = A or C
  source 1..201: mol_type = genomic DNA
ataaatgaacctggaagacattatgctgagtgaactaagccagtcacagtaagacaaatactgcatgattccacttacataaaatatttagagcaatcaanattgcagagacagggagctgaggcaggaggatcacttgaaggctgggagtttgagaccagcctgggcaacatagcatgacccatctcttaaaaaaattag

SEQ ID NO: 1351 - DNA, 201 bp, Homo sapiens
  variation 101: note = n = T or C
  source 1..201: mol_type = genomic DNA
acagagagaccaattacagggtcattgcaataatccagaacaatgcttttgagtagtaaagggggggtgaaggtagtgagaatttttttaactgtgtatangttttagaagttgagtcaagaagattttcttgcatggatatgtgaaagaaagagaaatctcagaagtcaaagattttggcctgagcagtaaaaaggatag

SEQ ID NO: 1352 - DNA, 201 bp, Homo sapiens
  variation 101: note = n = A or G
  source 1..201: mol_type = genomic DNA
aagttaggagtttttccgtgtgagttcaagaaagccgaaagtgaagtgatgataacaacggactgagaaaggtaagctaggaaaggatgcaagtgagaacntgaagacatggagaataagatcaatgcctgaagggccagtgggattgaaaaattgttagaggagggttgcctagtgagcaagaaaggtagtgggtgatgg

SEQ ID NO: 1353 - DNA, 201 bp, Homo sapiens
  variation 101: note = n = G or A
  source 1..201: mol_type = genomic DNA
tttggaaaaattaggaaaaaattaaaacatatatcatcctccaaagattactgatatctggtgtactcattcttgattcttgatctgtaggttagaaacgnggctgacaaattcagctgtgcaagtcgtgcactgtatgatctgaggaagcaccatccacataaattgctatatgatcagcactctctgggttgtgcacac

SEQ ID NO: 1354 - DNA, 201 bp, Homo sapiens
  variation 101: note = n = G or T
  source 1..201: mol_type = genomic DNA
gtgtgggtttctgtgtgtgatttcataaacacatcagtttttgtgtgtttgctatataatggaatcatattatataactgtattgttttgtgagctatttnttttacttcatagggtacattggcaaccttttttgtcagtacatagtgctaaataatatgtcatgctttgttttattttattaatattattactattatt

SEQ ID NO: 1355 - DNA, 201 bp, Homo sapiens
  variation 101: note = n = A or G
  source 1..201: mol_type = genomic DNA
atctcagtaagcatctcccacagttgcctgcccagtattttatcctgtgaactaataagaaaggtgccttataagtaaagtgactgtataatttattgtcnaaaccaaaacacctttgtgaccgaagaagtccactcttaataatcacgccaaaacaacacacagaaactggaatcgtcccaggagaacaagtcactctac

SEQ ID NO: 1356 - DNA, 201 bp, Homo sapiens
  variation 101: note = n = A or G
  source 1..201: mol_type = genomic DNA
tcatctcaaacagaaaccctgtactttttacagaagaatccccaccctaatctactctcagccctggtaacttctattatgctgtatgtctctaagaaatngactatgctaggttcatcttataattggaattatacaatatttgtcttttttgtctggcttacttcccttagcataatattttcaagataaatcatgttg

SEQ ID NO: 1357 - DNA, 201 bp, Homo sapiens
  variation 101: note = n = A or G
  source 1..201: mol_type = genomic DNA
caaagaattcttcaactctgtgagtggaatacaaatatcacaaagaagtttcggagaatgcttctctccagtttttatatgaagatatttcctttttcacnaccggcttcaaagtgcttcaaatatccacttgcagattctacaaaaagagtttcaaaactgctctatggagagaaaatttcaactctgtgagttgcaagc

SEQ ID NO: 1358 - DNA, 201 bp, Homo sapiens
  variation 101: note = n = G or A
  source 1..201: mol_type = genomic DNA
tggaactcctgagctcaagtgatccacctgcctctgcctcacaaagtgctgggattacaagcatgagccactgcacctggcctggatggactttttaatgncctagttaatagaaagctgcaaaacgaatgcagtgtgatttcttttttttcttttttcttttttttgagatggagtctcactctgttgcctaggctggag

SEQ ID NO: 1359 - DNA, 201 bp, Homo sapiens
  variation 101: note = n = T or A
  source 1..201: mol_type = genomic DNA
gcagctgtgatcccagatgtgatatgtttactagaacagatcaacacagcatctgacacttgatatatgatactcaatatgtcaaatacattcttttcaanccctatcattaaggaagaccaaaggcagttaacttttacacagcaaggacagtaatacacataccacttgccctatgttaagttacctactctctgtggt

SEQ ID NO: 1360 - DNA, 201 bp, Homo sapiens
  variation 101: note = n = T or C
  source 1..201: mol_type = genomic DNA
atctcatgtaatttattgaatactgtcctgaaaatgaaaaacagaatggttatatgcgtacttggagtacagtttctactgaatgcataccagtgtcacancattgtaaattcaaaacatttttaggtggaaatatggtaaagtgggaactgcgtgtatctagcttccagggcagtagtcttatttgtcattatatctcaa

SEQ ID NO: 1361 - DNA, 201 bp, Homo sapiens
  variation 101: note = n = T or C
  source 1..201: mol_type = genomic DNA
tatcttcctcatttgttttatacatcgaggatgtcagtgatatccaaacctggtaacaatgccattgcaaaaaaagaaatgtgtagaacaatatgcctcanaaacacagccacaacatttgttaactaaacatggcaagtaaatatagaaatatataacaaaatatagcaaaattatactatgacccaggtaggttttaat

SEQ ID NO: 1362 - DNA, 201 bp, Homo sapiens
  variation 101: note = n = G or A
  source 1..201: mol_type = genomic DNA
ttgaaaactctatataaaatgatatttttgagaaaaatgaaaaagactttaacaaaagaaaatatatgccatattctgggattagaagacttaatattgtncagatgtcaattccctctaaactgatctataaagccaatgcacttccagcaaatttctgtgatgaatattatgtgatgatgtgattccagaatttagaca

SEQ ID NO: 1363 - DNA, 201 bp, Homo sapiens
  variation 101: note = n = A or G
  source 1..201: mol_type = genomic DNA
aaaatgtctccttttacacatgtggaatatcctctagcatacatgcatatgcagaattgcttagtctggtatttatgcatggatatgaattttactagctnctaacaacttatactatagcaagggtagtatttgagaggtctcacttgtccaaattcttgccaacacttgatattgcaagactatagtttagtacaaatt

SEQ ID NO: 1364 - DNA, 201 bp, Homo sapiens
  variation 101: note = n = C or G
  source 1..201: mol_type = genomic DNA
tagggagggatatgttgtactctttttaagtggcagtttttataagttattttcaatgtggaatatgaaaccctataaatcagctttatactattgcattnactttgaataagtctattgtcgatgcatataatactaaatattggctaagagtggaagtaataagatctggtaagtattgctggtggcagaaaaaaaagt

SEQ ID NO: 1365 - DNA, 201 bp, Homo sapiens
  variation 101: note = n = C or T
  source 1..201: mol_type = genomic DNA
aacatgtattatttaaaattctacaatattataggcaattctataatattgtgaatgatattacggtgatcatccttgtatgtatatctttgcacacaaangctcagagttttagttggctatattaagtgggatactgagtgacagtcagtagatttaaaattatgatggatggtagtacccgctaaaataccctcaaac

SEQ ID NO: 1366 - DNA, 201 bp, Homo sapiens
  variation 101: note = n = G or A
  source 1..201: mol_type = genomic DNA
atacatcaaaagaatgatccaaaaacattgataacgtatcagtagaaatttgaagaacatatgtgagagaggattctaagggtgttagaccaaggagtgtngactataacattgaattcattaacatgatgcacttaataaagattctgaatttaatatgctagtttgttcaggttgaaatagctcttactgcttacttgt

SEQ ID NO: 1367 - DNA, 201 bp, Homo sapiens
  variation 101: note = n = G or A
  source 1..201: mol_type = genomic DNA
catgtttttccccacccagccagaagaataatttttcaaatgcaaggccaaccatatcactccccaactataccatccagtgaattcccattgagcacacngtaacatccaagcatcttaaccaggcacaagtgactctttataacttgtcccctctctcatccctctagtgctatccatatctcagtcctaacaatattg

SEQ ID NO: 1368 - DNA, 201 bp, Homo sapiens
  variation 101: note = n = G or C
  source 1..201: mol_type = genomic DNA
cagtgatgttatggcatcagggagccaggctccttcctttcactactccacccacctgaggagctccaagatgactttggaatgtctaggcagtccatctntctcagggtggaagaacaggcaaatggcatgcttgggatttgcaccctttctattaagaagacatcttggaagtacaacatcacactgattacatatcag

SEQ ID NO: 1369 - DNA, 201 bp, Homo sapiens
  variation 101: note = n = T or G
  source 1..201: mol_type = genomic DNA
gaattaggaaatcactatttcacaatcagcaatgaatgaatggatttaagcatttttcattccagctgcgaatatcaataaaaaagacattttatgcctantaataaagaagacattttgtaagggatcatttctgagactgatgaagtctctggatacaaattctaatttttaggaaatataggagacagaagaacacat

SEQ ID NO: 1370 - DNA, 201 bp, Homo sapiens
  variation 101: note = n = A or G
  source 1..201: mol_type = genomic DNA
cctaaaacttacattttacaggaggagatgaactatgaacaaagaaaaaactaagtaagatagttggtacagctgacggtattaagtgctgttgagaaaantaaagcaaggaaggtggtggggaatggggagtggtacttactcctcatagaactccaagacagaaatgtgtggcgtacttgttctatgtccacttttttt

SEQ ID NO: 1371 - DNA, 201 bp, Homo sapiens
  variation 101: note = n = C or T
  source 1..201: mol_type = genomic DNA
ggcagtcccagagactcccagcaacaacttggagatctgaatggggctggagatcattcattacacagctgcaggaatgagcagagaaacttgactttccntatgcatgtaaacacaggaggcttaaggaaatttggattacacttccttctagtcactgggggcttagggcaatgaaacaaggatgagtcgttgcaagtc

SEQ ID NO: 1372 - DNA, 201 bp, Homo sapiens
  variation 101: note = n = C or G
  source 1..201: mol_type = genomic DNA
actgtatgattctaaacatatgatattctggaaaaggcaaaactatgaaaatagtaaaaatatcaatagctgccagtgctcagggaaaggaaacaatgaanaggcaaagaacagaggacttttggggcaatggggactgtcatatattataatggcggatatatgtgattttacgtttgtccattttcacagaataaacaa

SEQ ID NO: 1373 - DNA, 201 bp, Homo sapiens
  variation 101: note = n = T or A
  source 1..201: mol_type = genomic DNA
agcaggaacaggagagaaaagtggaggtactacacacttaaacaaccagatctctcaagaactcactcgctatcacaaagagagcaccaagaggatggtgntggaccattcatgagaagtctacccccatgatccaatcacctcctggcaggctccacctccaatactgaggattgcgatttaacatgagatgtggatggg

SEQ ID NO: 1374 - DNA, 201 bp, Homo sapiens
  variation 101: note = n = G or A
  source 1..201: mol_type = genomic DNA
tctagagcaaggtttggaaaacttttcagtacaggatcagtttgtaaccatttttagcattgcaggccataggtttctgtgacaactcaatcctgccattntagtgcagaagcagtcaggggcatggccatggtccagtaacactttattctccaaaacagagggcaggttaaatgtgacctccactgtgtccggaatggg

SEQ ID NO: 1375 - DNA, 201 bp, Homo sapiens
  variation 101: note = n = A or G
  source 1..201: mol_type = genomic DNA
agtttccaagtccataaaaataatgtaatatatctccctctgagatttgttgaaagggcaaaattgaacaatgttagtaaagcaactagcacagtgctggncagataattcctccaataagggcatctattttgatggagggttgttttcccccttgaaaatgttagtactataaaatgatctcatagtttaaatgttcta

SEQ ID NO: 1376 - DNA, 201 bp, Homo sapiens
  variation 101: note = n = C or T
  source 1..201: mol_type = genomic DNA
gtaggttagaatttttaatgacatggtaaagaaagacctcattgagaagatgatgcttgagcacagatctgaaggaagtgaaggaacaagctgtatagtgnctaggcaaggaacattctagacagataaaatagaaagaacaaaatcctttacccagggggatttgcctgcagtgtggctaaagtggatacagtaagggga

SEQ ID NO: 1377 - DNA, 201 bp, Homo sapiens
  variation 101: note = n = T or C
  source 1..201: mol_type = genomic DNA
aatccctattgtaataccaatgacattcttcacagaaatagaaaaaataatcctacaattaatatggaaccacaaaagacccaaaatgaccaaagctattnggagcaaaaagaacaaaactgaaggaatcacattacctgacttcaaattatactgcagagctatagtaactaaaacagcatggtactagcataaaagcac

SEQ ID NO: 1378 - DNA, 201 bp, Homo sapiens
  variation 101: note = n = C or T
  source 1..201: mol_type = genomic DNA
ggtgatccacctgcctcggcctcccaaatgctgggattacaagcgtgagccaccatgcccagcctatcctggtaggttttaatctccttgagaacagaaantatgtttatttcaacattattacactaggggagggacttgaatagttgaccaataaatatatattaagtattaaataaaacagtcttcatgaatttctaa

SEQ ID NO: 1379 - DNA, 201 bp, Homo sapiens
  variation 101: note = n = T or C
  source 1..201: mol_type = genomic DNA
aggaaacaatttgaggataacactaattttctgattgattatatgtgatcttgtctgtgagacaaagaaaagtgcagcagaatcaagttttataggaatangtaaaatgctcaaatgtcaagcatgtatgagcgacctcattttctaccgggattatgagtcacacccattcatagatggtgttacacctttctgtctgat

SEQ ID NO: 1380 - DNA, 201 bp, Homo sapiens
  variation 101: note = n = A or G
  source 1..201: mol_type = genomic DNA
cattagggttctatttcatgacaataaaaatacatgctcattattaaaagtttggaaaacaaaagtcctgacaaaaattaaagcataattcaaccacctantaacaaaagctattaatattttgatgaatttccttccagtcttatttccatgcttgatttttgtttgtttatattacattattatggttatacttgttgt

SEQ ID NO: 1381 - DNA, 201 bp, Homo sapiens
  variation 101: note = n = T or C
  source 1..201: mol_type = genomic DNA
tcaactcctgggctatcctgtatcctgcttccttagaaaaccaaacatctccatggctgtacttgctacagaaagggcagaagcaacagaagatcagcctnataagaatcgttttctgactaataaatctcagccatgtgtttctgattagccggtcttgagccagacagatccagaccttcacgtgcaagggagtctggg

SEQ ID NO: 1382 - DNA, 201 bp, Homo sapiens
  variation 101: note = n = C or G
  source 1..201: mol_type = genomic DNA
ttggcttgacttcagatctcagtaggagtgatcggatgccaacagtggagaaatgggctgggcaattcctaggcctctgatggcatacttgagtcctgagnggatgaaactggaccagcagacatatcctgaggtcccttggcagtctgttcaggcaccatttatgataggcagagatggtcatccccaggccgcctttgg

SEQ ID NO: 1383 - DNA, 201 bp, Homo sapiens
  variation 101: note = n = G or C
  source 1..201: mol_type = genomic DNA
atccattttttcagcatcatattctttcttacattgtaagaatatttttcaagtatttatgtcaattatccgagaatatttagagttccatagacgaaaantatgcctcgtatttctttttactccaaaacaccttgaatagacaaaaataaaaaacaattctggtagtcttatagccactgtagatataaaagttttata

SEQ ID NO: 1384 - DNA, 201 bp, Homo sapiens
  variation 101: note = n = G or C
  source 1..201: mol_type = genomic DNA
aaacaaaagcaccgataagattagagtggagaaatgtacacatagagtcctttctaatttatgaatatggaataaccacttgttgggagagaaaggtaggnaaatgtcaacagtctcccacaaagccacagtggccataggagaaaaccaagtcggttgcccagcatagatttttctgattctgagacaagagaaaagctt

SEQ ID NO: 1385 - DNA, 201 bp, Homo sapiens
  variation 101: note = n = A or G
  source 1..201: mol_type = genomic DNA
acaaggaggagaagcttagagggagttcagcagattttctaagttaaggagacaaacctgagagcctgagaaaacaaagagggtagagatcacaggaaggngtcctggaaaagagagagtacaaagaaatacatctagatatctgcagaggatagcctcaagtattcagcagagtggtgatcatcagcaaacctatatgag

SEQ ID NO: 1386 - DNA, 201 bp, Homo sapiens
  variation 101: note = n = T or C
  source 1..201: mol_type = genomic DNA
aaccaaagcaagatcaaaatattatatagctcaacggtaatttattttaaccacttcttattcatttgacaaatatttactgaatatccactttggaccanttactggggatacatcactgaataaggatgtcctgttcactctcatcacattacttagagtctattaaaggaatcagagatcaaataattacagtaggag

SEQ ID NO: 1387 - DNA, 201 bp, Homo sapiens
  variation 101: note = n = A or T
  source 1..201: mol_type = genomic DNA
tgtggtcctttcacaacatggccacttcttcaaagccagtgggagaatctctcccttcaggaagggatctgtctctctttttaaaggcttttacctgattnagtcaggccttcctaagatgatctccattttgattaattcattatggtcaaatgatttgagaacttatttacatctgcaaaatctcttcacctttgccaa

SEQ ID NO: 1388 - DNA, 201 bp, Homo sapiens
  variation 101: note = n = T or C
  source 1..201: mol_type = genomic DNA
catgccagtgtttcaggtttttttctaagtattgggattttcaaaactatgttctggtctatggatagtttctcattgaattttctgttgcagggaagtgnaacctgatccttcctattctgtgttcttgctgacatcactcccctttaattatatatttttaaattcatttaccatactcatgcagtgcagtggaacata

SEQ ID NO: 1389 - DNA, 201 bp, Homo sapiens
  variation 101: note = n = G or A
  source 1..201: mol_type = genomic DNA
gtattggtgtatctaaaatagaaagtgtacagttaaaatatggtataaacaataaaaatggtacacctgtataatcagttaccatgaaaggagcttgcagnaatggaatggaagttgctctgggtaagtcagtgagtgagtggtaagtcagtgagtgagtggtaagtcagtgcaaaggcctgggacattactatacagtac

SEQ ID NO: 1390 - DNA, 201 bp, Homo sapiens
  variation 101: note = n = C or G
  source 1..201: mol_type = genomic DNA
cacctagaggcacttaccatagttcccattttacaggtgaggaaattgggcctggtaagttgtcacgcctcagatcatgcaactggcaaggcccaggtgantcaacctcagttttcagtgaccacgtaggctgcctctcaatgttggttcttgggaggctgcttaatagggtccccttccagggaagtagcaatgctggga

SEQ ID NO: 1391 - DNA, 201 bp, Homo sapiens
  variation 101: note = n = T or C
  source 1..201: mol_type = genomic DNA
gtattcatgtatgaaattggcaaaaatttaaaaatcatttttcagaaattgggcataaggcttcctgtggaaatggaaaaccatctagatggtgaaaccanctagaaaaataaattggtgaaatgtataaacagcattaaaaatttctatcattttgaaccagtaatccaacattaaattttttatacttaaaagatattc

SEQ ID NO: 1392 - DNA, 201 bp, Homo sapiens
  variation 101: note = n = A or T
  source 1..201: mol_type = genomic DNA
gctatatgctcatgagagaataagattctagaacaaataatggcttaccactattatgaaaattgtttttatctcatgaatttctgaaaatgcctggggantccatactttgagagtctctgcccaaattcattgtagttctgagatcatcccaaattttcaacaaaaaagcacataaattagttgttctccctagtgaca

SEQ ID NO: 1393 - DNA, 201 bp, Homo sapiens
  variation 101: note = n = A or G
  source 1..201: mol_type = genomic DNA
tctgttaggaattttgaaaaggcacaatggggatggcttaattctactccatgttgtctggggcttcagctgggataacttgaacggctggggataacccnaacagatggcatctttgctcacatgcatggtgtctgggctgggaaggctgaaggataggctcagctgcaattattaattagggaccccctatgtggcctc

SEQ ID NO: 1394 - DNA, 201 bp, Homo sapiens
  variation 101: note = n = G or T
  source 1..201: mol_type = genomic DNA
cttagcttttatctgtcttcactccttaaccctggatacagcataggaatcctggttgaaagaggggatgctgaattttcaacaaggtgtatgtatgattnggatctgtggccccaccaaatcttatgttagattgtaatctcaatattggaggtggggcctggtggaaggtgattggatcttagggttgaatgtctcatt

SEQ ID NO: 1395 - DNA, 201 bp, Homo sapiens
  variation 101: note = n = T or C
  source 1..201: mol_type = genomic DNA
tcctgaataaagtggagacagtcctcaacttatgtggggggggaggggtagtgtgtctacttacaatttttctaccttacaatgatgtcaaagtgatacanattaagtagaaaaaatatttcagatacccatccagttactctcttttcactttccatacagtattcgataatactgttgaatgagatacctcacacttta

SEQ ID NO: 1396 - DNA, 201 bp, Homo sapiens
  variation 101: note = n = G or T
  source 1..201: mol_type = genomic DNA
tatatatacacacacatatttatatatattcttgggaatatatatgaattcttaaagcgcaggctacactccacaccaattaaatcagaagctctgagtangaaaatcccagaccatagttttgttttttctttgtttgtttgttttgttttgttttaacttctcaggtgattccaatgtgcagccaagttggagaaatac

SEQ ID NO: 1397 - DNA, 201 bp, Homo sapiens
  variation 101: note = n = G or C
  source 1..201: mol_type = genomic DNA
aaactcaggctcagagtttagttgacatgggagatctggaatcagagtgcttaggttcaaacctcaactctgcctctgacaagctgcttgacgttgggganagtcgtataaattctaagcatctgttttgtcatctgtgaaacagagataagagacatctcggtgtggagattccataagataatataagtgaagtgatta

SEQ ID NO: 1398 - DNA, 201 bp, Homo sapiens
  variation 101: note = n = G or T
  source 1..201: mol_type = genomic DNA
aaaatatataactgagatcccaactcatgaaatccctgacattattaaaaacctgctcctcctcctgtttttccaatatcaatgaatggtatctatcaatnttcacctggctgtcaggccggaaaactgggaatgatatttaattcatctctctcactcatctctcacatttaattcatcatcaggttaattcagcttcca

SEQ ID NO: 1399 - DNA, 201 bp, Homo sapiens
  variation 101: note = n = T or A
  source 1..201: mol_type = genomic DNA
atgcaatatattaatatcatgtaacaaacttgcacatgtacatcctgaatctaagatataaggtgaaattagaaaagtaaaataaaataaaatggggcttngaaagtttgaaaaatttgcacaaatcacacagctagtatatggggaagccaaggttcaaattagtaatcagttaagtaaagaccaagatcagaaagataa

SEQ ID NO: 1400 - DNA, 201 bp, Homo sapiens
  variation 101: note = n = T or A
  source 1..201: mol_type = genomic DNA
ttggtgccctgatctcttgactccatcctctgatctcttactgatgtcttccattggctgaactaaactggaagccaaaggacaaggaaatctatagaggncagctccaaggcacagagcagaacagagcatggatctggagaggctaatatccagttcacttgccccaaacaaaatcatcttctctctaccgcctttccc
